(19) United States
(12) Patent Application Publication
(10) Pub. No.: US 2025/0136960 A1
(43) Pub. Date: May 1, 2025

(54) CELL DATA RECORDERS AND USES THEREOF

(71) Applicant: The Broad Instityte, Inc., Cambridge, MA (US)

(72) Inventors: David R. Liu, Lexington, MA (US); Weixin Tang, Somerville, MA (US)

(21) Appl. No.: 18/797,026

(22) Filed: Aug. 7, 2024

Related U.S. Application Data
(62) Division of application No. 16/970,115, filed on Aug. 14, 2020, now Pat. No. 12,060,586.
(60) Provisional application No. 62/631,455, filed on Feb. 15, 2018.
(60) Provisional application No. 62/758,241, filed on Nov. 9, 2018.

(51) Int. Cl. C12N 9/22; C12N 15/11; C12Q 1/02

(52) U.S. Cl. CPC C12N 9/22; C12N 15/11; C12Q 1/02; C12N 2310/20; C12N 2800/101; C12N 2800/107; C12N 2800/80

(57) ABSTRACT

Described herein are compositions, vectors, cells, methods, and kits that provide cell data recorder systems for recording cell states. The cell data recorder systems allow for the recording of both the presence and duration of one or more stimuli in a programmable, reproducible, and multiplexable manner. These cell data recorder systems employ a nucleic acid programmable DNA binding protein, such as a Cas9 nuclease, or a fusion protein comprising a nucleic acid programmable DNA binding domain and a nucleic acid editing domain to introduce recordable changes in the genome of a cell or in a plasmid within the cell.

### RELATED APPLICATIONS

[0001] This application is a Divisional of U.S. patent application Ser. No. 16/970,115, filed Aug. 14, 2020, which is the 371 National Stage of International Patent Application NO. PCT/US2019/018285, filed Feb. 15, 2019, which claims the benefit of priority to U.S. Provisional Patent Application Ser. No. 62/631,455, filed Feb. 15, 2018, and U.S. Provisional Patent Application Ser. No. 62/758,241, filed Nov. 9, 2018, which are herein incorporated by reference in its entirety.

### SEQUENCE LISTING XML

[0002] The instant application contains a Sequence Listing which has been submitted electronically in XML format and is hereby incorporated by reference in its entirety. Said XML copy, created on Jan. 16, 2025, is named BRB-01302_SL.xml and is 1,003,580 bytes in size.

### BACKGROUND

[0003] Despite the potential impact, tools capable of revealing a cell's history, and how cellular history impacts both present and future cell states, are far less developed than recent technologies that enable the study of internal cell state in detail. Detailed information on cell states during division and differentiation could illuminate the process of aging, while recording the presence and duration of exposure to external and internal stresses could give insight into the emergence of cancer or other diseases. However, recording a cell's history in a multiplexable, durable, and minimally perturbative manner has been a long-standing challenge.

### SUMMARY

[0004] Provided herein are compositions (e.g., nucleic acids), cells, systems, kits, and methods for recording the strength and/or duration of endogenous or exogenous stimuli over the course of a cell's lifetime. Some aspects of the disclosure provide a cell data recording system comprising a nucleic acid programmable DNA binding protein (napDNAbp) (e.g., a Cas9 domain) or a fusion protein comprising a nucleic acid programmable DNA binding protein and a nucelic acid editing domain (e.g., a base editor) operably linked to a promoter that induces the expression of the napDNA or the fusion protein to induce changes in cellular DNA (e.g., double-strand breaks, nucleobase editing) in response to a stimulus or change in cell. In contrast to digital memory devices that store information (e.g., the presence or absence of a stimulus) in one of two distinct states (i.e., “on” or “off”), these cell data recorders can induce permanent marks in cellular DNA in a manner that reflects both the strength (i.e., amplitude) and duration of one or more stimuli. Thus, in some aspects, provided herein are analog, multi-event cell data recording systems (also referred to as a “CRISPR-mediated analog multi-event recording apparatus” or “CAMERA”) that have the ability to simultaneously record multiple cell states, including, for example, exposure to a small molecule, a protein, a peptide, an amino acid, a metabolite, a sugar, a molecule produced during the activation of an endogenous or an exogenous signaling cascade, light, heat, mechanical stress, or a virus. Certain embodiments of these cell data recorders employ sequencing technologies (e.g., high-throughput sequencing) to measure readout (e.g., changes in cellular DNA) and are not dependent on large cell populations for both the recording of a stimulus or the readout of the change(s) in cellular DNA induced by the stimulus.

[0005] The clustered regularly interspaced short palindromic repeat (CRISPR) system is a prokaryotic adaptive immune system that has been modified to enable robust and general genome engineering in a variety of organisms and cell lines (see, e.g., Jansen et al. Identification of genes that are associated with DNA repeats in prokaryotes. Mol Microbiol. 2002; 43(6): 1565-75; and Mali et al. Cas9 as a versatile tool for engineering biology. Nat Methods. 2013; 10(10): 957-63). CRISPR-Cas (CRISPR-associated) systems are protein-RNA complexes that use an RNA molecule (gRNA) as a guide to localize the complex to a target DNA sequence via base-pairing (see, e.g., Jore et al. Structural basis for CRISPR RNA-guided DNA recognition by Cascade. Nat Struct Mol Biol. 2011; 18(5): 529-36). In the natural systems, a Cas protein then acts as an endonuclease to cleave the targeted double-stranded DNA sequence (see, e.g., Horvath P and Barrangou R. CRISPR/Cas, the immune system of bacteria and archaea. Science. 2010; 327(5962):167-70). Thus, this disclosure contemplates the use of such nucleic acid programmable DNA binding proteins (e.g., Cas9) for inducing recordable changes in a genome (e.g., the genome of a bacteria or human subject), such as the introduction of double-stranded DNA breaks. Among the known Cas proteins, Streptococcus pyogenes Cas9 (spCas9) has been the most widely used as a tool for genome engineering (see, e.g., Gasiunas G and Siksnys V. RNA-dependent DNA endonuclease Cas9 of the CRISPR system: Holy Grail of genome editing? Trends Microbiol. 2013; 21(11): 562-7). This Cas9 protein is a large, multi-domain protein containing two distinct nuclease domains. Point mutations can be introduced into these nuclease domains of Cas9 to abolish nuclease activity, resulting in a nuclease inactive Cas9 domain that still retains its ability to bind DNA in a sgRNA-programmed manner (see, e.g., Qi et al. Repurposing CRISPR as an RNA-guided platform for sequence-specific control of gene expression. Cell. 2013; 152(5): 1173-83). In principle, such Cas9 variants, when fused to another protein or domain, can target that protein to virtually any DNA sequence by co-expression with an appropriate sgRNA Thus, this disclosure also contemplates fusion proteins comprising such Cas9 variants and a nucelic acid editing domain (e.g., a deaminase, a nuclease, a nickase, a recombinase, a methyltransferase, a methylase, an acetylase, an acetyltransferase, a transcriptional activator, or a transcriptional repressor domain), as well as the use of such fusion proteins for inducing recordable nucleobase changes in a genome (e.g., the genome of a bacterial or human cell).

[0006] In the examples provided herein, certain exemplary cell data recorders comprise a writing plasmid and either one or more recorder plasmids or a recorder locus for recording changes in the DNA of a cell, or the DNA of a plasmid (e.g., a recording plasmid) provided by the cell data recorder system, (e.g., double-strand breaks, nucleobase editing) as a result of the activity of the napDNAbp or fusion protein. Without wishing to be bound by any particular theory, the components of the writing plasmid (e.g., napDNAbp, fusion protein, sgRNA) are generally operably linked to a promoter sequence which controls the expression of each component. In some embodiments, the components of the writing plasmid (e.g., napDNAbp, fusion protein, sgRNA) are operably linked to a single inducible promoter, such that the presence of the stimulus (e.g., a small molecule, a protein, a peptide, an amino acid, a metabolite, a sugar, a molecule produced during the activation of an endogenous or an exogenous signaling cascade, light, heat, mechanical stress, a virus, etc.) induces expression of all the components of the writing plasmid simultaneously. In some embodiments, one or more of the components of the writing plasmid (e.g., napDNAbp, base editor, sgRNA) are operably linked to a constitutively active promoter, such that the component is constitutively expressed in cells. In some embodiments, each component of the writing plasmid (e.g., napDNAbp, fusion protein, sgRNA) is operably linked to a different inducible promoter, where expression of each component is only initiated in the presence of the corresponding stimulus (e.g., small molecule, antibiotic, metabolite, protein, peptide, amino acid, molecule produced during an activated cell signaling cascade, light, heat, virus, etc). The use of multiple different inducible promoters operably linked to separate components of the cell data recorder system (e.g., writing plasmid, recording plasmid, one or more additional plasmids) allows for the generation of cell data recorders that recapitulate an “OR” logic gate, where signal output (e.g., double-strand breaks, nucleobase editing) is only recorded in the presence of the desired stimulus to be measured, but not in the presence of an undesired stimulus. In addition, the use of multiple different inducible promoters operably linked to separate components of the cell data recorder system (e.g., writing plasmid, recording plasmid, one or more additional plasmids) allows for the generation of cell data recorders that recapitulate an “AND” Boolean logic gate, where signal output (e.g., double-strand breaks, nucleobase editing) is only recorded in the presence of all required stimuli, but not in the presence of only one stimulus (see, e.g., FIG. 2).

[0007] Thus, in one aspect, provided herein is a writing plasmid comprising: (i) a nucleic acid sequence encoding a nucleic acid programmable DNA binding protein (napDNAbp) operably linked to a first promoter; (ii) a nucleic acid sequence encoding a single guide RNA (sgRNA) operably linked to a second promoter, wherein the sgRNA is complementary to a target sequence; and, optionally, (iii) an origin of replication; wherein at least one of the promoters is an inducible promoter, and wherein the sgRNA associates with the napDNAbp under conditions that induce expression of the sgRNA and expression of the napDNAbp.

[0008] In another aspect, provided herein is a writing plasmid for use in a bacterial cell comprising (i) a nucleic acid sequence encoding a fusion protein comprising a nucleic acid programmable DNA binding protein (napDNAbp) and a nucleic acid editing domain operably linked to a first promoter; (ii) a nucleic acid sequence encoding a sgRNA operably linked to a second promoter, wherein the sgRNA is complementary to a target sequence; and (iii) an origin of replication, wherein at least one of the promoters is an inducible promoter, and wherein the sgRNA associates with the napDNAbp under conditions that induce the expression of the fusion protein and expression of the sgRNA.

[0009] In another aspect, provided herein is a writing plasmid for use in a eukaryotic cell comprising (i) a nucleic acid sequence encoding a fusion protein comprising a nucleic acid programmable DNA binding protein (napDNAbp) and a nucleic acid editing domain operably linked to a first promoter; and (ii) an origin of replication, wherein the napDNAbp associates with an sgRNA under conditions that induce the expression of the fusion protein, and wherein the sgRNA is expressed by the eukaryotic cell.

[0010] In another aspect, provided herein is a writing plasmid for use in a eukaryotic cell comprising (i) a nucleic acid sequence encoding a fusion protein comprising a nucleic acid programmable DNA binding protein (napDNAbp) and a nucleic acid editing domain operably linked to a first promoter; (ii) a nucleic acid sequence encoding a sgRNA operably linked to a second promoter, wherein the sgRNA is complementary to a target sequence; and, optionally, (iii) an origin of replication, wherein at least one of the promoters is an inducible promoter, and wherein the sgRNA associates with the napDNAbp under conditions that induce the expression of the fusion protein and expression of the sgRNA.

[0011] In another aspect, provided herein is an integrated writing system in a eukaryotic cell comprising one or more loci present in the genome of the eukaryotic cell collectively comprising (i) a nucleic acid sequence encoding a fusion protein comprising a nucleic acid programmable DNA binding protein (napDNAbp) and a nucleic acid editing domain operably linked to a first promoter; and (ii) a nucleic acid sequence encoding a sgRNA operably linked to a second promoter, wherein the sgRNA is complementary to a target sequence, wherein at least one of the promoters is an inducible promoter, and wherein the sgRNA associates with the napDNAbp under conditions that induce the expression of the fusion protein and expression of the sgRNA.

[0012] In another aspect, provided herein are recording plasmids comprising (i) a target sequence complementary to a sgRNA, and (ii) an origin or replication.

[0013] In another aspect, provided herein is a cell data recorder system for use in prokaryotic cells comprising any of the writing plasmids described herein and one or more recording plasmids.

[0014] In another aspect, provided herein is a cell data recorder system for use in eukaryotic cells comprising any of the writing plasmids or the integrated writing systems provided herein and one or more recording loci, wherein each of the one or more recording loci comprises a target sequence complementary to an sgRNA expressed in the cell.

[0015] In another aspect, provided herein is a method for engineering a cell, the method comprising contacting the cell with one or more components of a cell data recorder system provided herein.

[0016] In another aspect, provided herein is a method for recording the presence/and or duration of one or more stimuli in a cell, the method comprising: (i) providing an engineered cell comprising the cell data recorder system; (ii) determining the percentage of base editing in a target sequence of a recording plasmid (R1); and (iii) comparing the percentage of base editing in the target sequence in the presence of the stimulus to the percentage of base editing in the absence of the stimulus.

[0017] In another aspect, provided herein is a method for recording the presence/and or duration of one or more stimuli in a cell, the method comprising: (i) providing an engineered cell comprising the cell data recorder system; (ii) determining an amount of the first recording plasmid (R1) and an amount of the second recording plasmid (R2) in the engineered cell; (iii) determining a ratio of the amount of the first recording plasmid (R1) and the amount of the second recording plasmid (R2); and (iv) comparing the ratio of R1 to R2 in the presence of the stimulus to the ratio of R1 to R2 in the absence of the stimulus.

[0018] The methods and compositions provided herein are useful in a wide variety of applications. For example, in certain embodiments, synthetic bacteria strains comprising a recording system provided herein can be used to monitor the gut microbiome by recording gut conditions with clinical implications. In other embodiments, engineered T cells comprising a recording system provided herein can be used to make treatment decisions by sensing disease indicators and becoming activated in the presence of, for example, inflammation or cancer.

[0019] In another aspect, provided herein is a method for recording the presence/and or duration of a stimulus, the method comprising: (i) providing an engineered cell comprising the cell data recorder system; (ii) determining the percentage of base editing in a target sequence of a recording locus; and (iii) comparing the percentage of base editing in the target sequence in the presence of the stimulus to the percentage of base editing in the absence of the stimulus.

[0020] Also provided herein are engineered cells comprising a writing plasmid, a recording plasmid, and/or one or more additional plasmids (e.g., accessory plasmids) provided herein. In some embodiments, the one or more components are transfected into the cells.

[0021] Also provided herein are kits comprising a writing plasmid, a recording plasmid, and/or one or more additional plasmids (e.g., accessory plasmids) provided herein.

[0022] The details of one or more embodiments of the invention are set forth in the Detailed Description of Certain Embodiments, as described below. Other features, objects, and advantages of the invention will be apparent from the Definitions, Examples, and Claims.

### BRIEF DESCRIPTION OF THE DRAWINGS

[0023] The accompanying drawings, which constitute a part of this specification, illustrate several embodiments of the invention and together with the description, serve to explain the principles of the invention.

[0024] FIGS. 1A-1D depict plasmid ratios controlled by Cas9 nuclease in CAMERA 1. FIG. 1A shows a schematic representation of CAMERA 1 systems. Recording plasmids R1 and R2 are identical except a 3-nucleotide coding mutation in the EGFP gene (SEQ ID Nos. 620 and 621, respectively). The expression of the Cas9:sgRNA complex is controlled by the signal of interest and results in R1 depletion in the bacteria that carry the recording plasmid pair. FIG. 1B shows the stability of the R1:R2 ratio in E. coli S1030 cells in the absence of the writing plasmid. FIG. 1C shows in vitro cleavage of the wild-type and mutated EGFP gene by Cas9 in the presence of sgRNA1. The designed spacer sequence targets the distinct region in EGFP so the Cas9:sgRNA complex cleaves R1 much faster than R2. FIG. 1D shows the recording amplitude and duration of anyhydrotetracycline (aTc) by CAMERA 1.0. The values and error bars reflect the mean R1 percentage and the standard deviation (s.d.) of replicates of three individual cultures originated from a single bacterial colony.

[0025] FIGS. 2A-2E depict the multi-event recording and resetting of CAMERA 1 systems. FIG. 2A shows the construction of an “AND” Boolean logic gate using CAMERA 1.1. Both IPTG and aTc are required for initiation of the recording process. FIG. 2B shows an analog recording of IPTG concentration by CAMERA 1.1 as reported by EGFP fluorescence. FIG. 2C shows repeated recording and erasing of CAMERA 1.2 by application of aTc and IPTG and kanamycin. FIG. 2D shows repeated recording and erasing of CAMERA 1.3 by inducing different writing complexes. FIG. 2E shows dose-dependent recording and erasing using CAMERA 1.3. Values and error bars reflect mean EGFP fluorescence or R3 content. The s.d. is calculated from three replicates.

[0026] FIGS. 3A-3F depict that CAMERA 2 systems use base editing to record the amplitude and duration of exogenous signals. FIG. 3A shows a schematic representation of CAMERA 2 systems. The writing plasmid expresses the writing complex consisting of BE2 and sgRNAs. The recording plasmid is targeted by the writing complex and generates memory in the form of C·G to T·A substitutions at guide RNA-specified loci (SEQ ID Nos. 620 and 622, respectively). FIG. 3B shows the recording of the concentration of aTc and the treatment duration in analog mode using CAMERA 2.0. FIG. 3C shows the recording of the concentration of IPTG in the presence or absence of aTc and the treatment duration in analog mode using CAMERA 2.1. FIG. 3D shows the rate of base editing at position 166 of the EGFP gene in CAMERA 2.0 reflects the schedule of exposure to the inducer. FIG. 3E shows that CAMERA 2.1 records the total time of exposure to IPTG, regardless of treatment pattern. FIG. 3F shows the recording of four exogenous stimuli using CAMERA 2.4. The presence of each signal, individually or in combinations, was recorded by base editing at each of several specified positions in the EGFP gene. The values and error bars reflect mean editing frequency and s.d. of three replicates.

[0027] FIGS. 4A-4E depict that CAMERA 2 systems can record the order of stimuli and a wide range of environmental signals. FIG. 4A shows a schematic representation of CAMERA 2.5 that records stimuli in an order-dependent manner, depicting editing at positions 129 (SEQ ID NO. 864) and positions 205-207 and 216 (SEQ ID NO. 865). FIG. 4B shows that CAMERA 2.6 records the presence of arabinose at position 205-207 in the format of C·G to T·A mutations.

[0028] FIG. 4C shows that the ratio of base editing at position 216:129 in CAMERA 2.5 indicates the order of exposure to two stimuli. A position 216:129 base editing ratio above 0.1 was only observed when the bacteria were treated first with arabinose and then with rhamnose, but not if arabinose exposure follows rhamnose exposure. FIG. 4D shows phage infection recording by CAMERA 2.6. FIG. 4E shows the light exposure recording with CAMERA 2.7 in bulk culture and in small numbers of cells. Light exposure duration can be recorded faithfully in bulk culture as well as in samples of only 100 or 10 cells. Values and error bars in bar graphs reflect mean editing and the s.d. of three replicates. The dots and error bars in dot plots in FIG. 4E represent the mean and s.d. of 15 replicates of randomly sorted sets of 100 or 10 cells.

[0029] FIGS. 5A-5E depict CAMERA 2m recordings in mammalian cells, where the “m” denotes CAMERA systems for recording in mammalian cells. FIG. 5A shows a schematic representation of CAMERA 2m in mammalian cells. FIG. 5B shows that CAMERA 2 m.0 functions in a multiplexed manner in mammalian cells by targeting the human safe harbor gene CCR5. FIG. 5C shows that CAMERA 2 m.1 records the presence of doxycycline in HEK293T cells through a doxycycline-controlled transcriptional activator. FIG. 5D shows that CAMERA 2 m.2 records the presence of doxycycline and IPTG in a multiplexed manner. Expression of sgRNA A and sgRNA B is repressed by LacI and TetR in the absence of stimuli and can be turned on at the addition of IPTG and doxycycline, respectively. FIG. 5E shows that CAMERA 2 m.3 responds to Wnt signaling and records the presence of a Wnt signaling stimulus at a target genomic safe harbor locus. The values and error bars reflect mean editing and the s.d. of three replicates.

[0030] FIG. 6 depicts growth curves of wild-type E. coli S1030 and E. coli S1030 transformed with a recording plasmid pair of different starting ratios in the presence or absence of the selection antibiotic. Three individual cultures were grown in a 24-deep-well plate at 37° C. with shaking for each tested condition. A 200-μL aliquot was transferred to a 96-well clear-bottom assay plate at the designed time points and the absorbance at 600 nm was measure using a TECAN Infinite M1000 Pro plate reader.

[0031] FIG. 7 depicts tuning the sensitivities of the writing plasmid by varying the Cas9 RBS. A weaker RBS (sd2U) and higher starting R1 content for transformation facilitate harvesting bacteria carrying both recording plasmids.

[0032] FIG. 8 depicts recording IPTG concentration by CAMERA 1.1 in E. coli reported by both the R1 content and EGFP fluorescence. Values and error bars reflect mean EGFP fluorescence or R3 content and the s.d. of three replicates.

[0033] FIG. 9 depicts tuning the recording plasmid ratio in CAMERA 1.2 using antibiotic treatments. Values and error bars reflect mean R3 content and the s.d. of two replicates.

[0034] FIG. 10 depicts recording and erasing using CAMERA 1.3 with a starting R3:R4 ratio of 77:23. The values and error bars reflect mean R3 content and the s.d. of three replicates.

[0035] FIGS. 11A-11C depict the recording of the amplitude and duration of exogenous signals using CAMERAs 2.2 and 2.3. FIG. 11A shows that the behavior of CAMERA 2.2 mimics an “AND” Boolean logic gate. Both aTc and arabinose are required to turn the memory device on. FIG. 11B shows an “AND” Boolean logic gate constructed using CAMERA 2.3. Both aTc and rhamnose are required to initiate the recording process. FIG. 11C shows that base editing accumulated at position 195 of the EGFP gene in CAMERA 2.3 is correlated with the concentration of rhamnose when aTc is supplied constantly. The values and error bars reflect mean editing and the s.d. of three replicates.

[0036] FIG. 12 depicts the sequence of arabinose and rhamnose exposures as reflected in CAMERA 2.5 recording, depicting editing at positions 129 (SEQ ID NO. 864) and positions 205-207 and 216 (SEQ ID NO. 865). The inducer application schedule is shown in the lower left. The presence of arabinose results in the C:G to T:A modifications at positions 205-207, whereas the C:G to T:A editing at position 129 reflects the bacterial encounter of rhamnose. Base editing at position 216 is dependent on the order of exposure to stimulus, with arabinose followed by rhamnose resulting in the strongest recording signal. The ratio of position 216 editing:position 129 editing strongly indicates order of exposure (see FIGS. 4A-4E). The values and error bars reflect mean editing at the corresponding positions and the s.d. of three replicates.

[0037] FIG. 13 depicts the light exposure recording with CAMERA 2.7 at the single-cell level. The values and error bars in dot plots represent mean editing and the s.d. of 15 replicates of randomly sorted cells.

[0038] FIG. 14 depicts the raw base editing efficiencies for CAMERA 2 in mammalian cells targeting the human safe harbor gene CCR5. The values and error bars reflect mean base editing efficiencies at the corresponding positions and the s.d. of three replicates.

[0039] FIG. 15 depicts luciferase activation in HEK293T cells carrying (LEF-TCF)₇-Luc (TOP-Flash) and (LEF-TCF)₇-BE3-P2A-Luc upon LiCl treatment. A plasmid that encodes the Renilla luciferase gene was co-transfected to normalize transfection efficiency. The values and error bars reflect mean Firefly luciferase/Renilla luciferase ratio in treated sample normalized to that of untreated cells and the s.d. of three replicates.

[0040] FIG. 16 depicts the raw base editing efficiencies for CAMERA 2 in mammalian cells targeting the human safe harbor gene CCR5. The recorded pathway and the inducing signal used in each experiment are indicated above each panel. Black bars represent the percent base editing in unstimulated cells, while the gray bars represent the percent base editing in the presence of the indicated stimulus.

### Definitions

[0041] As used herein and in the claims, the singular forms “a,” “an,” and “the” include the singular and the plural reference unless the context clearly indicates otherwise. Thus, for example, a reference to “an agent” includes a single agent and a plurality of such agents.

[0042] The term “base editor (BE),” or “nucleobase editor (NBE),” as used herein, refers to an agent comprising a polypeptide that is capable of making a modification to a base (e.g., A, T, C, G, or U) within a nucleic acid sequence (e.g., DNA or RNA). In some embodiments, the base editor is capable of deaminating a base within a nucleic acid. In some embodiments, the base editor is capable of deaminating a base within a DNA molecule. In some embodiments, the base editor is capable of deaminating a cytosine (C) in DNA. In some embodiments, the base editor is a fusion protein comprising a nucleic acid programmable DNA binding protein fused to a nucleic acid editing domain. In some embodiments, the base editor is a fusion protein comprising a nucleic acid programmable DNA binding protein (napDNAbp) fused to a cytidine deaminase domain. In some embodiments, the base editor comprises a Cas9 domain (e.g., dCas9 or Cas9n), CasX, CasY, Cpf1, C2c1, C2c2, C2c3, or Argonaute protein fused to a cytidine deaminase. In some embodiments, the base editor comprises a Cas9 nickase (Cas9n) fused to an cytidine deaminase domain. In some embodiments, the base editor comprises a nuclease-inactive Cas9 (dCas9) fused to a cytidine deaminase domain. In some embodiments, the base editor is fused to an inhibitor of base excision repair, for example, a UGI domain, or a dISN domain. In some embodiments, the base editor comprises a CasX protein fused to a cytidine deaminase domain. In some embodiments, the base editor comprises a CasY protein fused to a cytidine deaminase domain. In some embodiments, the base editor comprises a Cpf1 protein fused to a cytidine deaminase domain. In some embodiments, the base editor comprises a C2c1 protein fused to a cytidine deaminase domain. In some embodiments, the base editor comprises a C2c2 protein fused to a cytidine deaminase domain. In some embodiments, the base editor comprises a C2c3 protein fused to a cytidine deaminase domain. In some embodiments, the base editor comprises an Argonaute protein fused to a cytidine deaminase domain. Base editors have been described, e.g., in Patent Publication No. WO2017/070632, published Apr. 27, 2017, entitled “Nucleobase Editors and Uses Thereof”, in Patent Publication No. WO2018/027078, published Feb. 8, 2018, entitled “Adenosine Base Editors and Uses Thereof”, in Patent Publication No. WO2018/165629, published Sep. 13, 2018, entitled “Cytosine to Guanine Base Editor”, and in Patent Publication No. WO2018/176009, published Sep. 27, 2018, entitled “Nucleobase Editors Comprising Nucleic Acid Programmable DNA Binding Proteins”; the entire contents of each of which are incorporated by reference herein.

[0043] In some embodiments, the base editor is capable of deaminating an adenosine (A) in DNA. In some embodiments, the base editor is a fusion protein comprising a nucleic acid programmable DNA binding protein fused to a nucleic acid editing domain. In some embodiments, the base editor is a fusion protein comprising a nucleic acid programmable DNA binding protein (napDNAbp) fused to an adenosine deaminase domain. In some embodiments, the base editor is a fusion protein comprising a nucleic acid programmable DNA binding protein (napDNAbp) fused to one or more adenosine deaminase domains. In some embodiments, the base editor is a fusion protein comprising a nucleic acid programmable DNA binding protein (napDNAbp) fused to two adenosine deaminase domains. In some embodiments, the base editor comprises a Cas9 (e.g., dCas9 and Cas9n), CasX, CasY, Cpf1, C2c1, C2c2, C2c3, or Argonaute protein fused to an adenosine deaminase domain. In some embodiments, the base editor comprises a Cas9 nickase (Cas9n) fused to an adenosine deaminase domain. In some embodiments, the base editor comprises a Cas9 nickase (Cas9n) fused to two adenosine deaminase domains. In some embodiments, the base editor comprises a nuclease-inactive Cas9 (dCas9) fused to an adenosine deaminase domain. In some embodiments, the base editor comprises a nuclease-inactive Cas9 (dCas9) fused to two adenosine deaminase domains. In some embodiments, the base editor is fused to an inhibitor of base excision repair, for example, a UGI domain, or a dISN domain. In some embodiments, the base editor comprises a CasX protein fused to one or more adenosine deaminase domains. In some embodiments, the base editor comprises a CasY protein fused to one or more adenosine deaminase domains. In some embodiments, the base editor comprises a Cpf1 protein fused to one or more adenosine deaminase domains. In some embodiments, the base editor comprises a C2c1 protein fused to one or more adenosine deaminase domains. In some embodiments, the base editor comprises a C2c2 protein fused to one or more adenosine deaminase domains. In some embodiments, the base editor comprises a C2c3 protein fused to one or more adenosine deaminase domains. In some embodiments, the base editor comprises an Argonaute protein fused to one or more adenosine deaminase domains.

[0044] The term “nucleic acid programmable DNA binding protein” or “napDNAbp” refers to a protein that associates with a nucleic acid (e.g., DNA or RNA), such as a guide nucleic acid (e.g., gRNA), that guides the napDNAbp to a specific nucleic acid sequence, for example, by hybridizing to the target nucleic acid sequence. For example, a Cas9 protein can associate with a guide RNA that guides the Cas9 protein to a specific DNA sequence is has complementary to the guide RNA. In some embodiments, the napDNAbp is a class 2 microbial CRISPR-Cas effector. In some embodiments, the napDNAbp is a Cas9 domain, for example, a nuclease active Cas9, a Cas9 nickase (Cas9n), or a nuclease inactive Cas9 (dCas9). Examples of nucleic acid programmable DNA binding proteins include, without limitation, Cas9 (e.g., dCas9 and nCas9), CasX, CasY, Cpf1, C2c1, C2c2, C2C3, and Argonaute. It should be appreciated, however, that nucleic acid programmable DNA binding proteins also include nucleic acid programmable proteins that bind RNA. For example, the napDNAbp may be associated with a nucleic acid that guides the napDNAbp to an RNA. Other nucleic acid programmable DNA binding proteins are also within the scope of this disclosure, though they may not be specifically described in this disclosure.

[0045] In some embodiments, the napDNAbp is an “RNA-programmable nuclease” or “RNA-guided nuclease.” The terms are used interchangeably herein and refer to a nuclease that forms a complex with (e.g., binds or associates with) one or more RNA(s) that is not a target for cleavage. In some embodiments, an RNA-programmable nuclease, when in a complex with an RNA, may be referred to as a nuclease:RNA complex. Typically, the bound RNA(s) is referred to as a guide RNA (gRNA). Guide RNAs can exist as a complex of two or more RNAs, or as a single RNA molecule. Guide RNAs that exist as a single RNA molecule may be referred to as single-guide RNAs (sgRNAs), though “gRNA” is also used to refer to guide RNAs that exist as either single molecules or as a complex of two or more molecules. Typically, gRNAs that exist as a single RNA species comprise two domains: (1) a domain that shares homology to a target nucleic acid (i.e., directs binding of a Cas9 complex to the target); and (2) a domain that binds a Cas9 protein. In some embodiments, domain (2) corresponds to a sequence known as a tracrRNA and comprises a stem-loop structure. In some embodiments, domain (2) is identical or homologous to a tracrRNA as provided in Jinek et al., Science 337:816-821 (2012), the entire contents of which is incorporated herein by reference. Other examples of gRNAs (e.g., those including domain 2) can be found in International Patent Application PCT/US2014/054252, filed Sep. 5, 2014, published as Patent Publication No. WO2015/035139, published Mar. 12, 2015, entitled “Switchable Cas9 Nucleases And Uses Thereof,” and International Patent Application PCT/US2014/054247, filed Sep. 5, 2014, published as Patent Publication No. WO2015/035136, published Mar. 12, 2015, entitled “Delivery System For Functional Nucleases,” the entire contents of each are hereby incorporated by reference in their entirety. In some embodiments, a gRNA comprises two or more of domains (1) and (2), and may be referred to as an “extended gRNA.” For example, an extended gRNA will bind two or more Cas9 proteins and bind a target nucleic acid at two or more distinct regions, as described herein. The gRNA comprises a nucleotide sequence that complements a target site, which mediates binding of the nuclease/RNA complex to said target site, providing the sequence specificity of the nuclease:RNA complex. In some embodiments, the RNA-programmable nuclease is the (CRISPR-associated system) Cas9 endonuclease, for example, Cas9 (also known as Csn1) from Streptococcus pyogenes (see, e.g., “Complete genome sequence of an M1 strain of Streptococcus pyogenes.” Ferretti J. J., McShan W. M., Ajdic D. J., Savic D. J., Savic G., Lyon K., Primeaux C., Sezate S., Suvorov A. N., Kenton S., Lai H. S., Lin S. P., Qian Y., Jia H. G., Najar F. Z., Ren Q., Zhu H., Song L., White J., Yuan X., Clifton S. W., Roe B. A., McLaughlin R. E., Proc. Natl. Acad. Sci. U.S.A. 98:4658-4663 (2001); “CRISPR RNA maturation by trans-encoded small RNA and host factor RNase III.” Deltcheva E., Chylinski K., Sharma C. M., Gonzales K., Chao Y., Pirzada Z. A., Eckert M. R., Vogel J., Charpentier E., Nature 471:602-607 (2011); and “A programmable dual-RNA-guided DNA endonuclease in adaptive bacterial immunity.” Jinek M., Chylinski K., Fonfara I., Hauer M., Doudna J. A., Charpentier E. Science 337:816-821 (2012), the entire contents of each of which are incorporated herein by reference).

[0046] Because RNA-programmable nucleases (e.g., Cas9) use RNA:DNA hybridization to target DNA cleavage sites, these proteins are able to target, in principle, any sequence specified by the guide RNA. Methods of using RNA-programmable nucleases, such as Cas9, for site-specific cleavage (e.g., to modify a genome) are known in the art (see e.g., Cong et al., Multiplex genome engineering using CRISPR/Cas systems. Science 339, 819-823 (2013); Mali, P. et al., RNA-guided human genome engineering via Cas9. Science 339, 823-826 (2013); Hwang, W. Y. et al., Efficient genome editing in zebrafish using a CRISPR-Cas system. Nature biotechnology 31, 227-229 (2013); Jinek, M. et al. RNA-programmed genome editing in human cells. eLife 2, e00471 (2013); Dicarlo, J. E. et al., Genome engineering in Saccharomyces cerevisiae using CRISPR-Cas systems. Nucleic Acids Research (2013); Jiang, W. et al., RNA-guided editing of bacterial genomes using CRISPR-Cas systems. Nature Biotechnology 31, 233-239 (2013); the entire contents of each of which are incorporated herein by reference).

[0047] The term “Cas9” or “Cas9 nuclease” refers to an RNA-guided nuclease comprising a Cas9 protein, or a fragment thereof (e.g., a protein comprising an active, inactive, or partially active DNA cleavage domain of Cas9, and/or the gRNA binding domain of Cas9). A Cas9 nuclease may also be referred to as a casn1 nuclease or a CRISPR (Clustered Regularly Interspaced Short Palindromic Repeat)-associated nuclease. CRISPR is an adaptive immune system that provides protection against mobile genetic elements (viruses, transposable elements and conjugative plasmids). CRISPR clusters contain spacers, sequences complementary to antecedent mobile elements, and target invading nucleic acids. CRISPR clusters are transcribed and processed into CRISPR RNA (crRNA). In type II CRISPR systems correct processing of pre-crRNA requires a trans-encoded small RNA (tracrRNA), endogenous ribonuclease 3 (rnc) and a Cas9 protein. The tracrRNA serves as a guide for ribonuclease 3-aided processing of pre-crRNA. Subsequently, the Cas9/crRNA/tracrRNA complex endonucleolytically cleaves linear or circular dsDNA target complementary to the spacer. The target strand not complementary to crRNA is first cut endonucleolytically, then trimmed 3′-5′ exonucleolytically. In nature, DNA-binding and cleavage typically requires protein and both RNAs. However, single guide RNAs (“sgRNA”, or simply “gNRA”) can be engineered so as to incorporate aspects of both the crRNA and tracrRNA into a single RNA species (see, e.g., Jinek M., Chylinski K., Fonfara I., Hauer M., Doudna J. A., Charpentier E. Science 337:816-821(2012), the entire contents of which is hereby incorporated by reference). Cas9 recognizes a short motif in the CRISPR repeat sequences (the PAM or protospacer adjacent motif) to help distinguish self versus non-self. Cas9 nuclease sequences and structures are well known to those of ordinary skill in the art (see, e.g., “Complete genome sequence of an M1 strain of Streptococcus pyogenes.” Ferretti et al., J. J., McShan W. M., Ajdic D. J., Savic D. J., Savic G., Lyon K., Primeaux C., Sezate S., Suvorov A. N., Kenton S., Lai H. S., Lin S. P., Qian Y., Jia H. G., Najar F. Z., Ren Q., Zhu H., Song L., White J., Yuan X., Clifton S. W., Roe B. A., McLaughlin R. E., Proc. Natl. Acad. Sci. U.S.A. 98:4658-4663(2001); “CRISPR RNA maturation by trans-encoded small RNA and host factor RNase III.” Deltcheva E., Chylinski K., Sharma C. M., Gonzales K., Chao Y., Pirzada Z. A., Eckert M. R., Vogel J., Charpentier E., Nature 471:602-607(2011); and “A programmable dual-RNA-guided DNA endonuclease in adaptive bacterial immunity.” Jinek M., Chylinski K., Fonfara I., Hauer M., Doudna J. A., Charpentier E. Science 337:816-821(2012), the entire contents of each of which are incorporated herein by reference). Cas9 orthologs have been described in various species, including, but not limited to, S. pyogenes S. thermophiles, Geobaciullus stearothermophilus, Corynebacterium ulcerans, Corynebacterium diphtheria, Spiroplasma syrphidicola, Prevotella intermedia, Spiroplasma taiwanense, Streptococcus iniae, Belliella baltica, Psychroflexus torquisI, Listeria innocua, Campylobacter jejuni, or Neisseria meningitidis. In some embodiments, the Cas9 ortholog is an saCas9 domain, an spCas9 domain comprising one or more mutations to alter the PAM specificity, or a Cpf1 domain. Additional suitable Cas9 nucleases and sequences will be apparent to those of ordinary skill in the art based on this disclosure, and such Cas9 nucleases and sequences include Cas9 sequences from the organisms and loci disclosed in Chylinski, Rhun, and Charpentier, “The tracrRNA and Cas9 families of type II CRISPR-Cas immunity systems” (2013) RNA Biology 10:5, 726-737; the entire contents of which are incorporated herein by reference. In some embodiments, a Cas9 nuclease comprises one or more mutations that inactive the DNA cleavage domain, that is, the Cas9 is a nickase and/or a nuclease-inactivated Cas9 protein.

[0048] A nuclease-inactivated Cas9 protein may interchangeably be referred to as a “dCas9” protein (for nuclease-“dead” Cas9). Methods for generating a Cas9 protein (or a fragment thereof) having an inactive DNA cleavage domain are known (see, e.g., Jinek et al., Science. 337:816-821(2012); Qi et al., “Repurposing CRISPR as an RNA-Guided Platform for Sequence-Specific Control of Gene Expression” (2013) Cell. 28; 152(5):1173-83, the entire contents of each of which are incorporated herein by reference). For example, the DNA cleavage domain of Cas9 is known to include two subdomains, the HNH nuclease subdomain and the RuvC1 subdomain. The HNH subdomain cleaves the strand complementary to the gRNA, whereas the RuvC1 subdomain cleaves the non-complementary strand. Mutations within these subdomains can silence the nuclease activity of Cas9. For example, the mutations D10A and H840A completely inactivate the nuclease activity of S. pyogenes Cas9 (Jinek et al., Science. 337:816-821(2012); Qi et al., Cell. 28; 152(5):1173-83 (2013)). In some embodiments, proteins comprising fragments of Cas9 are provided. For example, in some embodiments, a protein comprises one of two Cas9 domains: (1) the gRNA binding domain of Cas9; or (2) the DNA cleavage domain of Cas9. In some embodiments, proteins comprising Cas9 or fragments thereof are referred to as “Cas9 variants.” A Cas9 variant shares homology to Cas9, or a fragment thereof. For example a Cas9 variant is at least about 70% identical, at least about 80% identical, at least about 90% identical, at least about 95% identical, at least about 96% identical, at least about 97% identical, at least about 98% identical, at least about 99% identical, at least about 99.5% identical, at least about 99.8% identical, or at least about 99.9% identical to wild type Cas9. In some embodiments, the Cas9 variant may have 1, 2, 3, 4, 5, 6, 7, 8, 9, 10, 11, 12, 13, 14, 15, 16, 17, 18, 19, 20, 21, 22, 21, 24, 25, 26, 27, 28, 29, 30, 31, 32, 33, 34, 35, 36, 37, 38, 39, 40, 41, 42, 43, 44, 45, 46, 47, 48, 49, 50, or more amino acid changes compared to wild type Cas9. In some embodiments, the Cas9 variant comprises a fragment of Cas9 (e.g., a gRNA binding domain or a DNA-cleavage domain), such that the fragment is at least about 70% identical, at least about 80% identical, at least about 90% identical, at least about 95% identical, at least about 96% identical, at least about 97% identical, at least about 98% identical, at least about 99% identical, at least about 99.5% identical, or at least about 99.9% identical to the corresponding fragment of wild type Cas9. In some embodiments, the fragment is at least 30%, at least 35%, at least 40%, at least 45%, at least 50%, at least 55%, at least 60%, at least 65%, at least 70%, at least 75%, at least 80%, at least 85%, at least 90%, at least 95% identical, at least 96%, at least 97%, at least 98%, at least 99%, or at least 99.5% of the amino acid length of a corresponding wild type Cas9.

[0049] In some embodiments, the fragment is at least 100 amino acids in length. In some embodiments, the fragment is at least 100, 150, 200, 250, 300, 350, 400, 450, 500, 550, 600, 650, 700, 750, 800, 850, 900, 950, 1000, 1050, 1100, 1150, 1200, 1250, or at least 1300 amino acids in length. In some embodiments, wild type Cas9 corresponds to Cas9 from Streptococcus pyogenes (NCBI Reference Sequence: NC_017053.1, SEQ ID NO:1 (nucleotide); SEQ ID NO:2 (amino acid)).

(SEQ ID NO: 1)
ATGGATAAGAAATACTCAATAGGCTTAGATATCGGCACAAATAGCGTCGGATGGGCGGTGATCACTGATGATTA
TAAGGTTCCGTCTAAAAAGTTCAAGGTTCTGGGAAATACAGACCGCCACAGTATCAAAAAAAATCTTATAGGGG
CTCTTTTATTTGGCAGTGGAGAGACAGCGGAAGCGACTCGTCTCAAACGGACAGCTCGTAGAAGGTATACACGT
CGGAAGAATCGTATTTGTTATCTACAGGAGATTTTTTCAAATGAGATGGCGAAAGTAGATGATAGTTTCTTTCA
TCGACTTGAAGAGTCTTTTTTGGTGGAAGAAGACAAGAAGCATGAACGTCATCCTATTTTTGGAAATATAGTAG
ATGAAGTTGCTTATCATGAGAAATATCCAACTATCTATCATCTGCGAAAAAAATTGGCAGATTCTACTGATAAA
GCGGATTTGCGCTTAATCTATTTGGCCTTAGCGCATATGATTAAGTTTCGTGGTCATTTTTTGATTGAGGGAGA
TTTAAATCCTGATAATAGTGATGTGGACAAACTATTTATCCAGTTGGTACAAATCTACAATCAATTATTTGAAG
AAAACCCTATTAACGCAAGTAGAGTAGATGCTAAAGCGATTCTTTCTGCACGATTGAGTAAATCAAGACGATTA
GAAAATCTCATTGCTCAGCTCCCCGGTGAGAAGAGAAATGGCTTGTTTGGGAATCTCATTGCTTTGTCATTGGG
ATTGACCCCTAATTTTAAATCAAATTTTGATTTGGCAGAAGATGCTAAATTACAGCTTTCAAAAGATACTTACG
ATGATGATTTAGATAATTTATTGGCGCAAATTGGAGATCAATATGCTGATTTGTTTTTGGCAGCTAAGAATTTA
TCAGATGCTATTTTACTTTCAGATATCCTAAGAGTAAATAGTGAAATAACTAAGGCTCCCCTATCAGCTTCAAT
GATTAAGCGCTACGATGAACATCATCAAGACTTGACTCTTTTAAAAGCTTTAGTTCGACAACAACTTCCAGAAA
AGTATAAAGAAATCTTTTTTGATCAATCAAAAAACGGATATGCAGGTTATATTGATGGGGGAGCTAGCCAAGAA
GAATTTTATAAATTTATCAAACCAATTTTAGAAAAAATGGATGGTACTGAGGAATTATTGGTGAAACTAAATCG
TGAAGATTTGCTGCGCAAGCAACGGACCTTTGACAACGGCTCTATTCCCCATCAAATTCACTTGGGTGAGCTGC
ATGCTATTTTGAGAAGACAAGAAGACTTTTATCCATTTTTAAAAGACAATCGTGAGAAGATTGAAAAAATCTTG
ACTTTTCGAATTCCTTATTATGTTGGTCCATTGGCGCGTGGCAATAGTCGTTTTGCATGGATGACTCGGAAGTC
TGAAGAAACAATTACCCCATGGAATTTTGAAGAAGTTGTCGATAAAGGTGCTTCAGCTCAATCATTTATTGAAC
GCATGACAAACTTTGATAAAAATCTTCCAAATGAAAAAGTACTACCAAAACATAGTTTGCTTTATGAGTATTTT
ACGGTTTATAACGAATTGACAAAGGTCAAATATGTTACTGAGGGAATGCGAAAACCAGCATTTCTTTCAGGTGA
ACAGAAGAAAGCCATTGTTGATTTACTCTTCAAAACAAATCGAAAAGTAACCGTTAAGCAATTAAAAGAAGATT
ATTTCAAAAAAATAGAATGTTTTGATAGTGTTGAAATTTCAGGAGTTGAAGATAGATTTAATGCTTCATTAGGC
GCCTACCATGATTTGCTAAAAATTATTAAAGATAAAGATTTTTTGGATAATGAAGAAAATGAAGATATCTTAGA
GGATATTGTTTTAACATTGACCTTATTTGAAGATAGGGGGATGATTGAGGAAAGACTTAAAACATATGCTCACC
TCTTTGATGATAAGGTGATGAAACAGCTTAAACGTCGCCGTTATACTGGTTGGGGACGTTTGTCTCGAAAATTG
ATTAATGGTATTAGGGATAAGCAATCTGGCAAAACAATATTAGATTTTTTGAAATCAGATGGTTTTGCCAATCG
CAATTTTATGCAGCTGATCCATGATGATAGTTTGACATTTAAAGAAGATATTCAAAAAGCACAGGTGTCTGGAC
AAGGCCATAGTTTACATGAACAGATTGCTAACTTAGCTGGCAGTCCTGCTATTAAAAAAGGTATTTTACAGACT
GTAAAAATTGTTGATGAACTGGTCAAAGTAATGGGGCATAAGCCAGAAAATATCGTTATTGAAATGGCACGTGA
AAATCAGACAACTCAAAAGGGCCAGAAAAATTCGCGAGAGCGTATGAAACGAATCGAAGAAGGTATCAAAGAAT
TAGGAAGTCAGATTCTTAAAGAGCATCCTGTTGAAAATACTCAATTGCAAAATGAAAAGCTCTATCTCTATTAT
CTACAAAATGGAAGAGACATGTATGTGGACCAAGAATTAGATATTAATCGTTTAAGTGATTATGATGTCGATCA
CATTGTTCCACAAAGTTTCATTAAAGACGATTCAATAGACAATAAGGTACTAACGCGTTCTGATAAAAATCGTG
GTAAATCGGATAACGTTCCAAGTGAAGAAGTAGTCAAAAAGATGAAAAACTATTGGAGACAACTTCTAAACGCC
AAGTTAATCACTCAACGTAAGTTTGATAATTTAACGAAAGCTGAACGTGGAGGTTTGAGTGAACTTGATAAAGC
TGGTTTTATCAAACGCCAATTGGTTGAAACTCGCCAAATCACTAAGCATGTGGCACAAATTTTGGATAGTCGCA
TGAATACTAAATACGATGAAAATGATAAACTTATTCGAGAGGTTAAAGTGATTACCTTAAAATCTAAATTAGTT
TCTGACTTCCGAAAAGATTTCCAATTCTATAAAGTACGTGAGATTAACAATTACCATCATGCCCATGATGCGTA
TCTAAATGCCGTCGTTGGAACTGCTTTGATTAAGAAATATCCAAAACTTGAATCGGAGTTTGTCTATGGTGATT
ATAAAGTTTATGATGTTCGTAAAATGATTGCTAAGTCTGAGCAAGAAATAGGCAAAGCAACCGCAAAATATTTC
TTTTACTCTAATATCATGAACTTCTTCAAAACAGAAATTACACTTGCAAATGGAGAGATTCGCAAACGCCCTCT
AATCGAAACTAATGGGGAAACTGGAGAAATTGTCTGGGATAAAGGGCGAGATTTTGCCACAGTGCGCAAAGTAT
TGTCCATGCCCCAAGTCAATATTGTCAAGAAAACAGAAGTACAGACAGGCGGATTCTCCAAGGAGTCAATTTTA
CCAAAAAGAAATTCGGACAAGCTTATTGCTCGTAAAAAAGACTGGGATCCAAAAAAATATGGTGGTTTTGATAG
TCCAACGGTAGCTTATTCAGTCCTAGTGGTTGCTAAGGTGGAAAAAGGGAAATCGAAGAAGTTAAAATCCGTTA
AAGAGTTACTAGGGATCACAATTATGGAAAGAAGTTCCTTTGAAAAAAATCCGATTGACTTTTTAGAAGCTAAA
GGATATAAGGAAGTTAAAAAAGACTTAATCATTAAACTACCTAAATATAGTCTTTTTGAGTTAGAAAACGGTCG
TAAACGGATGCTGGCTAGTGCCGGAGAATTACAAAAAGGAAATGAGCTGGCTCTGCCAAGCAAATATGTGAATT
TTTTATATTTAGCTAGTCATTATGAAAAGTTGAAGGGTAGTCCAGAAGATAACGAACAAAAACAATTGTTTGTG
GAGCAGCATAAGCATTATTTAGATGAGATTATTGAGCAAATCAGTGAATTTTCTAAGCGTGTTATTTTAGCAGA
TGCCAATTTAGATAAAGTTCTTAGTGCATATAACAAACATAGAGACAAACCAATACGTGAACAAGCAGAAAATA
TTATTCATTTATTTACGTTGACGAATCTTGGAGCTCCCGCTGCTTTTAAATATTTTGATACAACAATTGATCGT
AAACGATATACGTCTACAAAAGAAGTTTTAGATGCCACTCTTATCCATCAATCCATCACTGGTCTTTATGAAAC
ACGCATTGATTTGAGTCAGCTAGGAGGTGACTGA
(SEQ ID NO: 2)
MDKKYSIGLDIGTNSVGWAVITDDYKVPSKKFKVLGNTDRHSIKKNLIGALLFGSGETAEATRLKRTARRRYTR
RKNRICYLQEIFSNEMAKVDDSFFHRLEESFLVEEDKKHERHPIFGNIVDEVAYHEKYPTIYHLRKKLADSTDK
ADLRLIYLALAHMIKFRGHFLIEGDLNPDNSDVDKLFIQLVQIYNQLFEENPINASRVDAKAILSARLSKSRRL
ENLIAQLPGEKRNGLFGNLIALSLGLTPNFKSNFDLAEDAKLQLSKDTYDDDLDNLLAQIGDQYADLFLAAKNL
SDAILLSDILRVNSEITKAPLSASMIKRYDEHHQDLTLLKALVRQQLPEKYKEIFFDQSKNGYAGYIDGGASQE
EFYKFIKPILEKMDGTEELLVKLNREDLLRKQRTFDNGSIPHQIHLGELHAILRRQEDFYPFLKDNREKIEKIL
TFRIPYYVGPLARGNSRFAWMTRKSEETITPWNFEEVVDKGASAQSFIERMTNFDKNLPNEKVLPKHSLLYEYF
TVYNELTKVKYVTEGMRKPAFLSGEQKKAIVDLLFKTNRKVTVKQLKEDYFKKIECFDSVEISGVEDRFNASLG
AYHDLLKIIKDKDFLDNEENEDILEDIVLTLTLFEDRGMIEERLKTYAHLFDDKVMKQLKRRRYTGWGRLSRKL
INGIRDKQSGKTILDFLKSDGFANRNFMQLIHDDSLTFKEDIQKAQVSGQGHSLHEQIANLAGSPAIKKGILQT
VKIVDELVKVMGHKPENIVIEMARENQTTQKGQKNSRERMKRIEEGIKELGSQILKEHPVENTQLQNEKLYLYY
LQNGRDMYVDQELDINRLSDYDVDHIVPQSFIKDDSIDNKVLTRSDKNRGKSDNVPSEEVVKKMKNYWRQLLNA
KLITQRKFDNLTKAERGGLSELDKAGFIKRQLVETRQITKHVAQILDSRMNIKYDENDKLIREVKVITLKSKLV
SDFRKDFQFYKVREINNYHHAHDAYLNAVVGTALIKKYPKLESEFVYGDYKVYDVRKMIAKSEQEIGKATAKYF
FYSNIMNFFKTEITLANGEIRKRPLIETNGETGEIVWDKGRDFATVRKVLSMPQVNIVKKTEVQTGGFSKESIL
PKRNSDKLIARKKDWDPKKYGGFDSPTVAYSVLVVAKVEKGKSKKLKSVKELLGITIMERSSFEKNPIDFLEAK
GYKEVKKDLIIKLPKYSLFELENGRKRMLASAGELQKGNELALPSKYVNFLYLASHYEKLKGSPEDNEQKQLFV
EQHKHYLDEIIEQISEFSKRVILADANLDKVLSAYNKHRDKPIREQAENIIHLFTLTNLGAPAAFKYFDTTIDR
KRYTSTKEVLDATLIHQSITGLYETRIDLSQLGGD
(single underline: HNH domain; double underline: RuvC domain)

[0050] In some embodiments, wild type Cas9 corresponds to, or comprises SEQ ID NO:3 (nucleotide) and/or SEQ ID NO: 4 (amino acid):

(SEQ ID NO: 3)
ATGGATAAAAAGTATTCTATTGGTTTAGACATCGGCACTAATTCCGTTGGATGGGCTGTCATAACCGATGAATA
CAAAGTACCTTCAAAGAAATTTAAGGTGTTGGGGAACACAGACCGTCATTCGATTAAAAAGAATCTTATCGGTG
CCCTCCTATTCGATAGTGGCGAAACGGCAGAGGCGACTCGCCTGAAACGAACCGCTCGGAGAAGGTATACACGT
CGCAAGAACCGAATATGTTACTTACAAGAAATTTTTAGCAATGAGATGGCCAAAGTTGACGATTCTTTCTTTCA
CCGTTTGGAAGAGTCCTTCCTTGTCGAAGAGGACAAGAAACATGAACGGCACCCCATCTTTGGAAACATAGTAG
ATGAGGTGGCATATCATGAAAAGTACCCAACGATTTATCACCTCAGAAAAAAGCTAGTTGACTCAACTGATAAA
GCGGACCTGAGGTTAATCTACTTGGCTCTTGCCCATATGATAAAGTTCCGTGGGCACTTTCTCATTGAGGGTGA
TCTAAATCCGGACAACTCGGATGTCGACAAACTGTTCATCCAGTTAGTACAAACCTATAATCAGTTGTTTGAAG
AGAACCCTATAAATGCAAGTGGCGTGGATGCGAAGGCTATTCTTAGCGCCCGCCTCTCTAAATCCCGACGGCTA
GAAAACCTGATCGCACAATTACCCGGAGAGAAGAAAAATGGGTTGTTCGGTAACCTTATAGCGCTCTCACTAGG
CCTGACACCAAATTTTAAGTCGAACTTCGACTTAGCTGAAGATGCCAAATTGCAGCTTAGTAAGGACACGTACG
ATGACGATCTCGACAATCTACTGGCACAAATTGGAGATCAGTATGCGGACTTATTTTTGGCTGCCAAAAACCTT
AGCGATGCAATCCTCCTATCTGACATACTGAGAGTTAATACTGAGATTACCAAGGCGCCGTTATCCGCTTCAAT
GATCAAAAGGTACGATGAACATCACCAAGACTTGACACTTCTCAAGGCCCTAGTCCGTCAGCAACTGCCTGAGA
AATATAAGGAAATATTCTTTGATCAGTCGAAAAACGGGTACGCAGGTTATATTGACGGCGGAGCGAGTCAAGAG
GAATTCTACAAGTTTATCAAACCCATATTAGAGAAGATGGATGGGACGGAAGAGTTGCTTGTAAAACTCAATCG
CGAAGATCTACTGCGAAAGCAGCGGACTTTCGACAACGGTAGCATTCCACATCAAATCCACTTAGGCGAATTGC
ATGCTATACTTAGAAGGCAGGAGGATTTTTATCCGTTCCTCAAAGACAATCGTGAAAAGATTGAGAAAATCCTA
ACCTTTCGCATACCTTACTATGTGGGACCCCTGGCCCGAGGGAACTCTCGGTTCGCATGGATGACAAGAAAGTC
CGAAGAAACGATTACTCCATGGAATTTTGAGGAAGTTGTCGATAAAGGTGCGTCAGCTCAATCGTTCATCGAGA
GGATGACCAACTTTGACAAGAATTTACCGAACGAAAAAGTATTGCCTAAGCACAGTTTACTTTACGAGTATTTC
ACAGTGTACAATGAACTCACGAAAGTTAAGTATGTCACTGAGGGCATGCGTAAACCCGCCTTTCTAAGCGGAGA
ACAGAAGAAAGCAATAGTAGATCTGTTATTCAAGACCAACCGCAAAGTGACAGTTAAGCAATTGAAAGAGGACT
ACTTTAAGAAAATTGAATGCTTCGATTCTGTCGAGATCTCCGGGGTAGAAGATCGATTTAATGCGTCACTTGGT
ACGTATCATGACCTCCTAAAGATAATTAAAGATAAGGACTTCCTGGATAACGAAGAGAATGAAGATATCTTAGA
AGATATAGTGTTGACTCTTACCCTCTTTGAAGATCGGGAAATGATTGAGGAAAGACTAAAAACATACGCTCACC
TGTTCGACGATAAGGTTATGAAACAGTTAAAGAGGCGTCGCTATACGGGCTGGGGACGATTGTCGCGGAAACTT
ATCAACGGGATAAGAGACAAGCAAAGTGGTAAAACTATTCTCGATTTTCTAAAGAGCGACGGCTTCGCCAATAG
GAACTTTATGCAGCTGATCCATGATGACTCTTTAACCTTCAAAGAGGATATACAAAAGGCACAGGTTTCCGGAC
AAGGGGACTCATTGCACGAACATATTGCGAATCTTGCTGGTTCGCCAGCCATCAAAAAGGGCATACTCCAGACA
GTCAAAGTAGTGGATGAGCTAGTTAAGGTCATGGGACGTCACAAACCGGAAAACATTGTAATCGAGATGGCACG
CGAAAATCAAACGACTCAGAAGGGGCAAAAAAACAGTCGAGAGCGGATGAAGAGAATAGAAGAGGGTATTAAAG
AACTGGGCAGCCAGATCTTAAAGGAGCATCCTGTGGAAAATACCCAATTGCAGAACGAGAAACTTTACCTCTAT
TACCTACAAAATGGAAGGGACATGTATGTTGATCAGGAACTGGACATAAACCGTTTATCTGATTACGACGTCGA
TCACATTGTACCCCAATCCTTTTTGAAGGACGATTCAATCGACAATAAAGTGCTTACACGCTCGGATAAGAACC
GAGGGAAAAGTGACAATGTTCCAAGCGAGGAAGTCGTAAAGAAAATGAAGAACTATTGGCGGCAGCTCCTAAAT
GCGAAACTGATAACGCAAAGAAAGTTCGATAACTTAACTAAAGCTGAGAGGGGTGGCTTGTCTGAACTTGACAA
GGCCGGATTTATTAAACGTCAGCTCGTGGAAACCCGCCAAATCACAAAGCATGTTGCACAGATACTAGATTCCC
GAATGAATACGAAATACGACGAGAACGATAAGCTGATTCGGGAAGTCAAAGTAATCACTTTAAAGTCAAAATTG
GTGTCGGACTTCAGAAAGGATTTTCAATTCTATAAAGTTAGGGAGATAAATAACTACCACCATGCGCACGACGC
TTATCTTAATGCCGTCGTAGGGACCGCACTCATTAAGAAATACCCGAAGCTAGAAAGTGAGTTTGTGTATGGTG
ATTACAAAGTTTATGACGTCCGTAAGATGATCGCGAAAAGCGAACAGGAGATAGGCAAGGCTACAGCCAAATAC
TTCTTTTATTCTAACATTATGAATTTCTTTAAGACGGAAATCACTCTGGCAAACGGAGAGATACGCAAACGACC
TTTAATTGAAACCAATGGGGAGACAGGTGAAATCGTATGGGATAAGGGCCGGGACTTCGCGACGGTGAGAAAAG
TTTTGTCCATGCCCCAAGTCAACATAGTAAAGAAAACTGAGGTGCAGACCGGAGGGTTTTCAAAGGAATCGATT
CTTCCAAAAAGGAATAGTGATAAGCTCATCGCTCGTAAAAAGGACTGGGACCCGAAAAAGTACGGTGGCTTCGA
TAGCCCTACAGTTGCCTATTCTGTCCTAGTAGTGGCAAAAGTTGAGAAGGGAAAATCCAAGAAACTGAAGTCAG
TCAAAGAATTATTGGGGATAACGATTATGGAGCGCTCGTCTTTTGAAAAGAACCCCATCGACTTCCTTGAGGCG
AAAGGTTACAAGGAAGTAAAAAAGGATCTCATAATTAAACTACCAAAGTATAGTCTGTTTGAGTTAGAAAATGG
CCGAAAACGGATGTTGGCTAGCGCCGGAGAGCTTCAAAAGGGGAACGAACTCGCACTACCGTCTAAATACGTGA
ATTTCCTGTATTTAGCGTCCCATTACGAGAAGTTGAAAGGTTCACCTGAAGATAACGAACAGAAGCAACTTTTT
GTTGAGCAGCACAAACATTATCTCGACGAAATCATAGAGCAAATTTCGGAATTCAGTAAGAGAGTCATCCTAGC
TGATGCCAATCTGGACAAAGTATTAAGCGCATACAACAAGCACAGGGATAAACCCATACGTGAGCAGGCGGAAA
ATATTATCCATTTGTTTACTCTTACCAACCTCGGCGCTCCAGCCGCATTCAAGTATTTTGACACAACGATAGAT
CGCAAACGATACACTTCTACCAAGGAGGTGCTAGACGCGACACTGATTCACCAATCCATCACGGGATTATATGA
AACTCGGATAGATTTGTCACAGCTTGGGGGTGACGGATCCCCCAAGAAGAAGAGGAAAGTCTCGAGCGACTACA
AAGACCATGACGGTGATTATAAAGATCATGACATCGATTACAAGGATGACGATGACAAGGCTGCAGGA
(SEQ ID NO: 4)
MDKKYSIGLAIGTNSVGWAVITDEYKVPSKKFKVLGNTDRHSIKKNLIGALLFDSGETAEATRLKRTARRRYTR
RKNRICYLQEIFSNEMAKVDDSFFHRLEESFLVEEDKKHERHPIFGNIVDEVAYHEKYPTIYHLRKKLVDSTDK
ADLRLIYLALAHMIKFRGHFLIEGDLNPDNSDVDKLFIQLVQTYNQLFEENPINASGVDAKAILSARLSKSRRL
ENLIAQLPGEKKNGLFGNLIALSLGLTPNFKSNFDLAEDAKLQLSKDTYDDDLDNLLAQIGDQYADLFLAAKNL
SDAILLSDILRVNTEITKAPLSASMIKRYDEHHQDLTLLKALVRQQLPEKYKEIFFDQSKNGYAGYIDGGASQE
EFYKFIKPILEKMDGTEELLVKLNREDLLRKQRTFDNGSIPHQIHLGELHAILRRQEDFYPFLKDNREKIEKIL
TFRIPYYVGPLARGNSRFAWMTRKSEETITPWNFEEVVDKGASAQSFIERMTNFDKNLPNEKVLPKHSLLYEYF
TVYNELTKVKYVTEGMRKPAFLSGEQKKAIVDLLFKTNRKVTVKQLKEDYFKKIECFDSVEISGVEDRFNASLG
TYHDLLKIIKDKDFLDNEENEDILEDIVLTLTLFEDREMIEERLKTYAHLFDDKVMKQLKRRRYTGWGRLSRKL
INGIRDKQSGKTILDFLKSDGFANRNFMQLIHDDSLTFKEDIQKAQVSGQGDSLHEHIANLAGSPAIKKGILQT
VKVVDELVKVMGRHKPENIVIEMARENQTTQKGQKNSRERMKRIEEGIKELGSQILKEHPVENTQLQNEKLYLY
YLQNGRDMYVDQELDINRLSDYDVDHIVPQSFLKDDSIDNKVLTRSDKNRGKSDNVPSEEVVKKMKNYWRQLLN
AKLITQRKFDNLTKAERGGLSELDKAGFIKRQLVETRQITKHVAQILDSRMNTKYDENDKLIREVKVITLKSKL
VSDFRKDFQFYKVREINNYHHAHDAYLNAVVGTALIKKYPKLESEFVYGDYKVYDVRKMIAKSEQEIGKATAKY
FFYSNIMNFFKTEITLANGEIRKRPLIETNGETGEIVWDKGRDFATVRKVLSMPQVNIVKKTEVQTGGFSKESI
LPKRNSDKLIARKKDWDPKKYGGFDSPTVAYSVLVVAKVEKGKSKKLKSVKELLGITIMERSSFEKNPIDFLEA
KGYKEVKKDLIIKLPKYSLFELENGRKRMLASAGELQKGNELALPSKYVNFLYLASHYEKLKGSPEDNEQKQLF
VEQHKHYLDEIIEQISEFSKRVILADANLDKVLSAYNKHRDKPIREQAENIIHLFTLTNLGAPAAFKYFDTTID
RKRYTSTKEVLDATLIHQSITGLYETRIDLSQLGGD
(single underline: HNH domain; double underline: RuvC domain)

[0051] In some embodiments, wild type Cas9 corresponds to Cas9 from Streptococcus pyogenes (NCBI Reference Sequence: NC_002737.2, SEQ ID NO: 5 (nucleotide); and Uniprot Reference Sequence: Q99ZW2, SEQ ID NO: 10 (amino acid).

(SEQ ID NO: 5)
ATGGATAAGAAATACTCAATAGGCTTAGATATCGGCACAAATAGCGTCGGATGGGCGGTGATCACTGATGAATA
TAAGGTTCCGTCTAAAAAGTTCAAGGTTCTGGGAAATACAGACCGCCACAGTATCAAAAAAAATCTTATAGGGG
CTCTTTTATTTGACAGTGGAGAGACAGCGGAAGCGACTCGTCTCAAACGGACAGCTCGTAGAAGGTATACACGT
CGGAAGAATCGTATTTGTTATCTACAGGAGATTTTTTCAAATGAGATGGCGAAAGTAGATGATAGTTTCTTTCA
TCGACTTGAAGAGTCTTTTTTGGTGGAAGAAGACAAGAAGCATGAACGTCATCCTATTTTTGGAAATATAGTAG
ATGAAGTTGCTTATCATGAGAAATATCCAACTATCTATCATCTGCGAAAAAAATTGGTAGATTCTACTGATAAA
GCGGATTTGCGCTTAATCTATTTGGCCTTAGCGCATATGATTAAGTTTCGTGGTCATTTTTTGATTGAGGGAGA
TTTAAATCCTGATAATAGTGATGTGGACAAACTATTTATCCAGTTGGTACAAACCTACAATCAATTATTTGAAG
AAAACCCTATTAACGCAAGTGGAGTAGATGCTAAAGCGATTCTTTCTGCACGATTGAGTAAATCAAGACGATTA
GAAAATCTCATTGCTCAGCTCCCCGGTGAGAAGAAAAATGGCTTATTTGGGAATCTCATTGCTTTGTCATTGGG
TTTGACCCCTAATTTTAAATCAAATTTTGATTTGGCAGAAGATGCTAAATTACAGCTTTCAAAAGATACTTACG
ATGATGATTTAGATAATTTATTGGCGCAAATTGGAGATCAATATGCTGATTTGTTTTTGGCAGCTAAGAATTTA
TCAGATGCTATTTTACTTTCAGATATCCTAAGAGTAAATACTGAAATAACTAAGGCTCCCCTATCAGCTTCAAT
GATTAAACGCTACGATGAACATCATCAAGACTTGACTCTTTTAAAAGCTTTAGTTCGACAACAACTTCCAGAAA
AGTATAAAGAAATCTTTTTTGATCAATCAAAAAACGGATATGCAGGTTATATTGATGGGGGAGCTAGCCAAGAA
GAATTTTATAAATTTATCAAACCAATTTTAGAAAAAATGGATGGTACTGAGGAATTATTGGTGAAACTAAATCG
TGAAGATTTGCTGCGCAAGCAACGGACCTTTGACAACGGCTCTATTCCCCATCAAATTCACTTGGGTGAGCTGC
ATGCTATTTTGAGAAGACAAGAAGACTTTTATCCATTTTTAAAAGACAATCGTGAGAAGATTGAAAAAATCTTG
ACTTTTCGAATTCCTTATTATGTTGGTCCATTGGCGCGTGGCAATAGTCGTTTTGCATGGATGACTCGGAAGTC
TGAAGAAACAATTACCCCATGGAATTTTGAAGAAGTTGTCGATAAAGGTGCTTCAGCTCAATCATTTATTGAAC
GCATGACAAACTTTGATAAAAATCTTCCAAATGAAAAAGTACTACCAAAACATAGTTTGCTTTATGAGTATTTT
ACGGTTTATAACGAATTGACAAAGGTCAAATATGTTACTGAAGGAATGCGAAAACCAGCATTTCTTTCAGGTGA
ACAGAAGAAAGCCATTGTTGATTTACTCTTCAAAACAAATCGAAAAGTAACCGTTAAGCAATTAAAAGAAGATT
ATTTCAAAAAAATAGAATGTTTTGATAGTGTTGAAATTTCAGGAGTTGAAGATAGATTTAATGCTTCATTAGGT
ACCTACCATGATTTGCTAAAAATTATTAAAGATAAAGATTTTTTGGATAATGAAGAAAATGAAGATATCTTAGA
GGATATTGTTTTAACATTGACCTTATTTGAAGATAGGGAGATGATTGAGGAAAGACTTAAAACATATGCTCACC
TCTTTGATGATAAGGTGATGAAACAGCTTAAACGTCGCCGTTATACTGGTTGGGGACGTTTGTCTCGAAAATTG
ATTAATGGTATTAGGGATAAGCAATCTGGCAAAACAATATTAGATTTTTTGAAATCAGATGGTTTTGCCAATCG
CAATTTTATGCAGCTGATCCATGATGATAGTTTGACATTTAAAGAAGACATTCAAAAAGCACAAGTGTCTGGAC
AAGGCGATAGTTTACATGAACATATTGCAAATTTAGCTGGTAGCCCTGCTATTAAAAAAGGTATTTTACAGACT
GTAAAAGTTGTTGATGAATTGGTCAAAGTAATGGGGCGGCATAAGCCAGAAAATATCGTTATTGAAATGGCACG
TGAAAATCAGACAACTCAAAAGGGCCAGAAAAATTCGCGAGAGCGTATGAAACGAATCGAAGAAGGTATCAAAG
AATTAGGAAGTCAGATTCTTAAAGAGCATCCTGTTGAAAATACTCAATTGCAAAATGAAAAGCTCTATCTCTAT
TATCTCCAAAATGGAAGAGACATGTATGTGGACCAAGAATTAGATATTAATCGTTTAAGTGATTATGATGTCGA
TCACATTGTTCCACAAAGTTTCCTTAAAGACGATTCAATAGACAATAAGGTCTTAACGCGTTCTGATAAAAATC
GTGGTAAATCGGATAACGTTCCAAGTGAAGAAGTAGTCAAAAAGATGAAAAACTATTGGAGACAACTTCTAAAC
GCCAAGTTAATCACTCAACGTAAGTTTGATAATTTAACGAAAGCTGAACGTGGAGGTTTGAGTGAACTTGATAA
AGCTGGTTTTATCAAACGCCAATTGGTTGAAACTCGCCAAATCACTAAGCATGTGGCACAAATTTTGGATAGTC
GCATGAATACTAAATACGATGAAAATGATAAACTTATTCGAGAGGTTAAAGTGATTACCTTAAAATCTAAATTA
GTTTCTGACTTCCGAAAAGATTTCCAATTCTATAAAGTACGTGAGATTAACAATTACCATCATGCCCATGATGC
GTATCTAAATGCCGTCGTTGGAACTGCTTTGATTAAGAAATATCCAAAACTTGAATCGGAGTTTGTCTATGGTG
ATTATAAAGTTTATGATGTTCGTAAAATGATTGCTAAGTCTGAGCAAGAAATAGGCAAAGCAACCGCAAAATAT
TTCTTTTACTCTAATATCATGAACTTCTTCAAAACAGAAATTACACTTGCAAATGGAGAGATTCGCAAACGCCC
TCTAATCGAAACTAATGGGGAAACTGGAGAAATTGTCTGGGATAAAGGGCGAGATTTTGCCACAGTGCGCAAAG
TATTGTCCATGCCCCAAGTCAATATTGTCAAGAAAACAGAAGTACAGACAGGCGGATTCTCCAAGGAGTCAATT
TTACCAAAAAGAAATTCGGACAAGCTTATTGCTCGTAAAAAAGACTGGGATCCAAAAAAATATGGTGGTTTTGA
TAGTCCAACGGTAGCTTATTCAGTCCTAGTGGTTGCTAAGGTGGAAAAAGGGAAATCGAAGAAGTTAAAATCCG
TTAAAGAGTTACTAGGGATCACAATTATGGAAAGAAGTTCCTTTGAAAAAAATCCGATTGACTTTTTAGAAGCT
AAAGGATATAAGGAAGTTAAAAAAGACTTAATCATTAAACTACCTAAATATAGTCTTTTTGAGTTAGAAAACGG
TCGTAAACGGATGCTGGCTAGTGCCGGAGAATTACAAAAAGGAAATGAGCTGGCTCTGCCAAGCAAATATGTGA
ATTTTTTATATTTAGCTAGTCATTATGAAAAGTTGAAGGGTAGTCCAGAAGATAACGAACAAAAACAATTGTTT
GTGGAGCAGCATAAGCATTATTTAGATGAGATTATTGAGCAAATCAGTGAATTTTCTAAGCGTGTTATTTTAGC
AGATGCCAATTTAGATAAAGTTCTTAGTGCATATAACAAACATAGAGACAAACCAATACGTGAACAAGCAGAAA
ATATTATTCATTTATTTACGTTGACGAATCTTGGAGCTCCCGCTGCTTTTAAATATTTTGATACAACAATTGAT
CGTAAACGATATACGTCTACAAAAGAAGTTTTAGATGCCACTCTTATCCATCAATCCATCACTGGTCTTTATGA
AACACGCATTGATTTGAGTCAGCTAGGAGGTGACTGA
(SEQ ID NO: 10)
MDKKYSIGLDIGTNSVGWAVITDEYKVPSKKFKVLGNTDRHSIKKNLIGALLFDSGETAEATRLKRTARRRYTR
RKNRICYLQEIFSNEMAKVDDSFFHRLEESFLVEEDKKHERHPIFGNIVDEVAYHEKYPTIYHLRKKLVDSTDK
ADLRLIYLALAHMIKFRGHFLIEGDLNPDNSDVDKLFIQLVQTYNQLFEENPINASGVDAKAILSARLSKSRRL
ENLIAQLPGEKKNGLFGNLIALSLGLTPNFKSNFDLAEDAKLQLSKDTYDDDLDNLLAQIGDQYADLFLAAKNL
SDAILLSDILRVNTEITKAPLSASMIKRYDEHHQDLTLLKALVRQQLPEKYKEIFFDQSKNGYAGYIDGGASQE
EFYKFIKPILEKMDGTEELLVKLNREDLLRKQRTFDNGSIPHQIHLGELHAILRRQEDFYPFLKDNREKIEKIL
TFRIPYYVGPLARGNSRFAWMTRKSEETITPWNFEEVVDKGASAQSFIERMTNFDKNLPNEKVLPKHSLLYEYF
TVYNELTKVKYVTEGMRKPAFLSGEQKKAIVDLLFKTNRKVTVKQLKEDYFKKIECFDSVEISGVEDRFNASLG
TYHDLLKIIKDKDFLDNEENEDILEDIVLTLTLFEDREMIEERLKTYAHLFDDKVMKQLKRRRYTGWGRLSRKL
INGIRDKQSGKTILDFLKSDGFANRNFMQLIHDDSLTFKEDIQKAQVSGQGDSLHEHIANLAGSPAIKKGILQT
VKVVDELVKVMGRHKPENIVIEMARENQTTQKGQKNSRERMKRIEEGIKELGSQILKEHPVENTQLQNEKLYLY
YLQNGRDMYVDQELDINRLSDYDVDHIVPQSFLKDDSIDNKVLTRSDKNRGKSDNVPSEEVVKKMKNYWRQLLN
AKLITQRKEDNLTKAERGGLSELDKAGFIKRQLVETRQITKHVAQILDSRMNTKYDENDKLIREVKVITLKSKL
VSDFRKDFQFYKVREINNYHHAHDAYLNAVVGTALIKKYPKLESEFVYGDYKVYDVRKMIAKSEQEIGKATAKY
FFYSNIMNFEKTEITLANGEIRKRPLIEINGETGEIVWDKGRDFATVRKVLSMPQVNIVKKTEVQTGGFSKESI
LPKRNSDKLIARKKDWDPKKYGGFDSPTVAYSVLVVAKVEKGKSKKLKSVKELLGITIMERSSFEKNPIDFLEA
KGYKEVKKDLIIKLPKYSLFELENGRKRMLASAGELQKGNELALPSKYVNFLYLASHYEKLKGSPEDNEQKQLF
VEQHKHYLDEIIEQISEFSKRVILADANLDKVLSAYNKHRDKPIREQAENIIHLFTLTNLGAPAAFKYFDTTID
RKRYTSTKEVLDATLIHQSITGLYETRIDLSQLGGD
(single underline: HNH domain; double underline: RuvC domain)

[0052] In some embodiments, Cas9 refers to Cas9 from: Corynebacterium ulcerans (NCBI Refs: NC_015683.1, NC_017317.1); Corynebacterium diphtheria (NCBI Refs: NC_016782.1, NC_016786.1); Spiroplasma syrphidicola (NCBI Ref: NC_021284.1); Prevotella intermedia (NCBI Ref: NC_017861.1); Spiroplasma taiwanense (NCBI Ref: NC_021846.1); Streptococcus iniae (NCBI Ref: NC_021314.1); Belliella baltica (NCBI Ref: NC_018010.1); Psychroflexus torquisI (NCBI Ref: NC_018721.1); Streptococcus thermophilus (NCBI Ref: YP_820832.1), Geobacillus stearothermophilus (NCBI Ref: NZ_CP008934.1); Listeria innocua (NCBI Ref: NP_472073.1), Campylobacter jejuni (NCBI Ref: YP_002344900.1) or Neisseria meningitidis (NCBI Ref: YP_002342100.1) or to a Cas9 from any of the organisms listed in Example 1.

[0053] In some embodiments, dCas9 corresponds to, or comprises in part or in whole, a Cas9 amino acid sequence having one or more mutations that inactivate the Cas9 nuclease activity. For example, in some embodiments, a dCas9 domain comprises D10A and/or H840A mutation. In some embodiments, a dCas9 domain comprises the amino acid sequence of SEQ ID NO: 6.

dCas9 (D10A and H840A):
(SEQ ID NO: 6)
MDKKYSIGLAIGTNSVGWAVITDEYKVPSKKFKVLGNTDRHSIKKNLIGALLFDSGETAEATRLKRTARRRYTR
RKNRICYLQEIFSNEMAKVDDSFFHRLEESFLVEEDKKHERHPIFGNIVDEVAYHEKYPTIYHLRKKLVDSTDK
ADLRLIYLALAHMIKFRGHFLIEGDLNPDNSDVDKLFIQLVQTYNQLFEENPINASGVDAKAILSARLSKSRRL
ENLIAQLPGEKKNGLFGNLIALSLGLTPNFKSNFDLAEDAKLQLSKDTYDDDLDNLLAQIGDQYADLFLAAKNL
SDAILLSDILRVNTEITKAPLSASMIKRYDEHHQDLTLLKALVRQQLPEKYKEIFFDQSKNGYAGYIDGGASQE
EFYKFIKPILEKMDGTEELLVKLNREDLLRKQRTFDNGSIPHQIHLGELHAILRRQEDFYPFLKDNREKIEKIL
TFRIPYYVGPLARGNSRFAWMTRKSEETITPWNFEEVVDKGASAQSFIERMTNFDKNLPNEKVLPKHSLLYEYF
TVYNELTKVKYVTEGMRKPAFLSGEQKKAIVDLLFKTNRKVIVKQLKEDYFKKIECFDSVEISGVEDRFNASLG
TYHDLLKIIKDKDFLDNEENEDILEDIVLTLTLFEDREMIEERLKTYAHLFDDKVMKQLKRRRYTGWGRLSRKL

[chemical structure]

[chemical structure]

YLQNGRDMYVDQELDINRLSDYDVDAIVPQSFLKDDSIDNKVLTRSDKNRGKSDNVPSEEVVKKMKNYWRQLLN

[chemical structure]

[chemical structure]

[chemical structure]

LPKRNSDKLIARKKDWDPKKYGGFDSPTVAYSVLVVAKVEKGKSKKLKSVKELLGITIMERSSFEKNPIDFLEA
KGYKEVKKDLIIKLPKYSLFELENGRKRMLASAGELQKGNELALPSKYVNFLYLASHYEKLKGSPEDNEQKQLF
VEQHKHYLDEIIEQISEFSKRVILADANLDKVLSAYNKHRDKPIREQAENIIHLFTLTNLGAPAAFKYFDTTID
RKRYTSTKEVLDATLIHQSITGLYETRIDLSQLGGD

[0054] In some embodiments, the Cas9 domain comprises a D10A mutation, while the residue at position 840 remains a histidine in the amino acid sequence provided in SEQ ID NO: 10, or at corresponding positions in any of the amino acid sequences provided in SEQ ID NOs: 11-260. Without wishing to be bound by any particular theory, the presence of the catalytic residue H840 restores the activity of the Cas9 to cleave the non-edited (e.g., non-deaminated) strand containing a G opposite the targeted C. Restoration of H840 (e.g., from A840) does not result in the cleavage of the target strand containing the C. Such Cas9 variants are able to generate a single-strand DNA break (nick) at a specific location based on the gRNA-defined target sequence, leading to repair of the non-edited strand, ultimately resulting in a G to A change on the non-edited strand. Briefly, the C of a C-G base pair can be deaminated to a U by a deaminase, e.g., an APOBEC deaminase. Nicking the non-edited strand, the strand having the G, facilitates removal of the G via mismatch repair mechanisms. Uracil-DNA glycosylase inhibitor protein (UGI) inhibits Uracil-DNA glycosylase (UDG), which prevents removal of the U.

[0055] In other embodiments, dCas9 variants having mutations other than D10A and H840A are provided, which, e.g., result in nuclease inactivated Cas9 (dCas9). Such mutations, by way of example, include other amino acid substitutions at D10 and H820, or other substitutions within the nuclease domains of Cas9 (e.g., substitutions in the HNH nuclease subdomain and/or the RuvC1 subdomain). In some embodiments, variants or homologues of dCas9 (e.g., variants of SEQ ID NO: 10) are provided which are at least about 70% identical, at least about 80% identical, at least about 90% identical, at least about 95% identical, at least about 98% identical, at least about 99% identical, at least about 99.5% identical, or at least about 99.9% identical to SEQ ID NO: 10. In some embodiments, variants of dCas9 (e.g., variants of SEQ ID NO: 10) are provided having amino acid sequences which are shorter, or longer than SEQ ID NO: 10, by about 5 amino acids, by about 10 amino acids, by about 15 amino acids, by about 20 amino acids, by about 25 amino acids, by about 30 amino acids, by about 40 amino acids, by about 50 amino acids, by about 75 amino acids, by about 100 amino acids or more.

[0056] The term “Cas9 nickase” or “Cas9n,” as used herein, refers to a Cas9 protein that is capable of cleaving only one strand of a duplexed nucleic acid molecule (e.g., a duplexed DNA molecule). In some embodiments, a Cas9 nickase comprises a D10A mutation and has a histidine at position H840 of SEQ ID NO: 10, or a corresponding mutation in any of SEQ ID NOs: 11-260. For example, a Cas9 nickase may comprise the amino acid sequence as set forth in SEQ ID NO: 7. Such a Cas9 nickase has an active HNH nuclease domain and is able to cleave the non-targeted strand of DNA, i.e., the strand bound by the gRNA. Further, such a Cas9 nickase has an inactive RuvC nuclease domain and is not able to cleave the targeted strand of the DNA, i.e., the strand where base editing is desired. In some embodiments, a Cas9 nickase comprises a H840A mutation and has an aspartic acid at position D10 of SEQ ID NO: 10, or a corresponding mutation in any of SEQ ID NOs: 11-260. For example, a Cas9 nickase may comprise the amino acid sequence as set forth in SEQ ID NO: 8.

Exemplary Cas9 nickase (D10A; Cloning vector pPlatTET-gRNA2; Accession No.
BAV54124):
(SEQ ID NO: 7; D10A mutation shown in bold)
MDKKYSIGLAIGTNSVGWAVITDEYKVPSKKFKVLGNTDRHSIKKNLIGALLFDSGETAEATRLKRTARRRYTR
RKNRICYLQEIFSNEMAKVDDSFFHRLEESFLVEEDKKHERHPIFGNIVDEVAYHEKYPTIYHLRKKLVDSTDK
ADLRLIYLALAHMIKFRGHFLIEGDLNPDNSDVDKLFIQLVQTYNQLFEENPINASGVDAKAILSARLSKSRRL
ENLIAQLPGEKKNGLEGNLIALSLGLTPNFKSNFDLAEDAKLQLSKDTYDDDLDNLLAQIGDQYADLFLAAKNL
SDAILLSDILRVNTEITKAPLSASMIKRYDEHHQDLTLLKALVRQQLPEKYKEIFFDQSKNGYAGYIDGGASQE
EFYKFIKPILEKMDGTEELLVKLNREDLLRKQRTFDNGSIPHQIHLGELHAILRRQEDFYPFLKDNREKIEKIL
TFRIPYYVGPLARGNSRFAWMTRKSEETITPWNFEEVVDKGASAQSFIERMTNEDKNLPNEKVLPKHSLLYEYF
TVYNELTKVKYVTEGMRKPAFLSGEQKKAIVDLLFKTNRKVTVKQLKEDYFKKIECFDSVEISGVEDRFNASLG
TYHDLLKIIKDKDFLDNEENEDILEDIVLTLTLFEDREMIEERLKTYAHLFDDKVMKQLKRRRYTGWGRLSRKL
INGIRDKQSGKTILDFLKSDGFANRNFMQLIHDDSLTFKEDIQKAQVSGQGDSLHEHIANLAGSPAIKKGILQT
VKVVDELVKVMGRHKPENIVIEMARENQTTQKGQKNSRERMKRIEEGIKELGSQILKEHPVENTQLQNEKLYLY
YLQNGRDMYVDQELDINRLSDYDVDHIVPQSFLKDDSIDNKVLTRSDKNRGKSDNVPSEEVVKKMKNYWRQLLN
AKLITQRKFDNLTKAERGGLSELDKAGFIKRQLVETRQITKHVAQILDSRMNTKYDENDKLIREVKVITLKSKL
VSDFRKDFQFYKVREINNYHHAHDAYLNAVVGTALIKKYPKLESEFVYGDYKVYDVRKMIAKSEQEIGKATAKY
FFYSNIMNFFKTEITLANGEIRKRPLIETNGETGEIVWDKGRDFATVRKVLSMPQVNIVKKTEVQTGGFSKESI
LPKRNSDKLIARKKDWDPKKYGGFDSPTVAYSVLVVAKVEKGKSKKLKSVKELLGITIMERSSFEKNPIDFLEA
KGYKEVKKDLIIKLPKYSLFELENGRKRMLASAGELQKGNELALPSKYVNFLYLASHYEKLKGSPEDNEQKQLF
VEQHKHYLDEIIEQISEFSKRVILADANLDKVLSAYNKHRDKPIREQAENIIHLFTLTNLGAPAAFKYFDTTID
RKRYTSTKEVLDATLIHQSITGLYETRIDLSQLGGD
Exemplary Cas9 nickase (H804A):
(SEQ ID NO: 8; H840A mutation shown in bold)
MDKKYSIGLDIGTNSVGWAVITDEYKVPSKKFKVLGNTDRHSIKKNLIGALLFDSGETAEATRLKRTARRRYTR
RKNRICYLQEIFSNEMAKVDDSFFHRLEESFLVEEDKKHERHPIFGNIVDEVAYHEKYPTIYHLRKKLVDSTDK
ADLRLIYLALAHMIKFRGHFLIEGDLNPDNSDVDKLFIQLVQTYNQLFEENPINASGVDAKAILSARLSKSRRL
ENLIAQLPGEKKNGLEGNLIALSLGLTPNFKSNFDLAEDAKLQLSKDTYDDDLDNLLAQIGDQYADLFLAAKNL
SDAILLSDILRVNTEITKAPLSASMIKRYDEHHQDLTLLKALVRQQLPEKYKEIFFDQSKNGYAGYIDGGASQE
EFYKFIKPILEKMDGTEELLVKLNREDLLRKQRTFDNGSIPHQIHLGELHAILRRQEDFYPFLKDNREKIEKIL
TERIPYYVGPLARGNSRFAWMTRKSEETITPWNFEEVVDKGASAQSFIERMTNFDKNLPNEKVLPKHSLLYEYF
TVYNELTKVKYVTEGMRKPAFLSGEQKKAIVDLLFKTNRKVTVKQLKEDYFKKIECFDSVEISGVEDRFNASLG
TYHDLLKIIKDKDFLDNEENEDILEDIVLTLTLFEDREMIEERLKTYAHLFDDKVMKQLKRRRYTGWGRLSRKL
INGIRDKQSGKTILDFLKSDGFANRNFMQLIHDDSLTFKEDIQKAQVSGQGDSLHEHIANLAGSPAIKKGILQT
VKVVDELVKVMGRHKPENIVIEMARENQTTQKGQKNSRERMKRIEEGIKELGSQILKEHPVENTQLQNEKLYLY
YLQNGRDMYVDQELDINRLSDYDVDAIVPQSFLKDDSIDNKVLTRSDKNRGKSDNVPSEEVVKKMKNYWRQLLN
AKLITQRKFDNLIKAERGGLSELDKAGFIKRQLVETRQITKHVAQILDSRMNTKYDENDKLIREVKVITLKSKL
VSDFRKDFQFYKVREINNYHHAHDAYLNAVVGTALIKKYPKLESEFVYGDYKVYDVRKMIAKSEQEIGKATAKY
FFYSNIMNFFKTEITLANGEIRKRPLIETNGETGEIVWDKGRDFATVRKVLSMPQVNIVKKTEVQTGGFSKESI
LPKRNSDKLIARKKDWDPKKYGGFDSPTVAYSVLVVAKVEKGKSKKLKSVKELLGITIMERSSFEKNPIDFLEA
KGYKEVKKDLIIKLPKYSLFELENGRKRMLASAGELQKGNELALPSKYVNFLYLASHYEKLKGSPEDNEQKQLF
VEQHKHYLDEIIEQISEFSKRVILADANLDKVLSAYNKHRDKPIREQAENIIHLFTLTNLGAPAAFKYFDTTID
RKRYTSTKEVLDATLIHQSITGLYETRIDLSQLGGD

[0057] In some embodiments, Cas9 fusion proteins as provided herein comprise the full-length amino acid sequence of a Cas9 protein, e.g., one of the Cas9 sequences provided herein. In other embodiments, however, fusion proteins as provided herein do not comprise a full-length Cas9 sequence, but only a fragment thereof. For example, in some embodiments, a Cas9 fusion protein provided herein comprises a Cas9 fragment, wherein the fragment binds crRNA and tracrRNA or sgRNA, but does not comprise a functional nuclease domain, e.g., in that it comprises only a truncated version of a nuclease domain or no nuclease domain at all. Exemplary amino acid sequences of suitable Cas9 domains and Cas9 fragments are provided herein, and additional suitable sequences of Cas9 domains and fragments will be apparent to those of ordinary skill in the art. In some embodiments, Cas9 refers to Cas9 from: Corynebacterium ulcerans (NCBI Refs: NC_015683.1, NC_017317.1); Corynebacterium diphtheria (NCBI Refs: NC_016782.1, NC_016786.1); Spiroplasma syrphidicola (NCBI Ref: NC_021284.1); Prevotella intermedia (NCBI Ref: NC_017861.1); Spiroplasma taiwanense (NCBI Ref: NC_021846.1); Streptococcus iniae (NCBI Ref: NC_021314.1); Belliella baltica (NCBI Ref: NC_018010.1); Psychroflexus torquis I (NCBI Ref: NC_018721.1); Streptococcus thermophilus (NCBI Ref: YP_820832.1); Geobacillus stearothermophilus (NCBI Ref: NZ_CP008934.1); Listeria innocua (NCBI Ref: NP_472073.1); Campylobacter jejuni (NCBI Ref: YP_002344900.1); or Neisseria. meningitidis (NCBI Ref: YP_002342100.1).

[0058] The term “deaminase” or “deaminase domain,” as used herein, refers to a protein or enzyme that catalyzes a deamination reaction. In some embodiments, the deaminase or deaminase domain is a naturally-occurring deaminase from an organism, such as a human, chimpanzee, gorilla, monkey, cow, dog, rat, or mouse. In some embodiments, the deaminase or deaminase domain is a variant of a naturally-occurring deaminase from an organism, that does not occur in nature. For example, in some embodiments, the deaminase or deaminase domain is at least 50%, at least 55%, at least 60%, at least 65%, at least 70%, at least 75% at least 80%, at least 85%, at least 90%, at least 95%, at least 96%, at least 97%, at least 98%, at least 99%, or at least 99.5% identical to a naturally-occurring deaminase from an organism.

[0059] In some embodiments, the deaminase or deaminase domain is a cytidine deaminase, catalyzing the hydrolytic deamination of cytidine or deoxycytidine to uridine or deoxyuridine, respectively. In some embodiments, the deaminase or deaminase domain is a cytidine deaminase domain, catalyzing the hydrolytic deamination of cytosine to uracil. In some embodiments, the cytidine deaminase catalyzes the hydrolytic deamination of cytidine or cytosine in deoxyribonucleic acid (DNA). In some embodiments, the cytidine deaminase domain comprises the amino acid sequence of any one of SEQ ID NO: 350-389. In some embodiments, the cytidine deaminase or cytidine deaminase domain is a naturally-occurring cytidine deaminase from an organism, such as a human, chimpanzee, gorilla, monkey, cow, dog, rat, or mouse. In some embodiments, the cytidine deaminase or cytidine deaminase domain is a variant of a naturally-occurring cytidine deaminase from an organism that does not occur in nature. For example, in some embodiments, the cytidine deaminase or cytidine deaminase domain is at least 50%, at least 55%, at least 60%, at least 65%, at least 70%, at least 75% at least 80%, at least 85%, at least 90%, at least 95%, at least 96%, at least 97%, at least 98%, at least 99%, or at least 99.5% identical to a naturally-occurring cytidine deaminase from an organism, such as a human, chimpanzee, gorilla, monkey, cow, dog, rat, or mouse.

[0060] In some embodiments, the deaminase or deaminase domain is an adenosine deaminase, which catalyzes the hydrolytic deamination of adenine or adenosine. In some embodiments, the deaminase or deaminase domain is an adenosine deaminase, catalyzing the hydrolytic deamination of adenosine or deoxyadenosine to inosine or deoxyinosine, respectively. In some embodiments, the adenosine deaminase catalyzes the hydrolytic deamination of adenine or adenosine in deoxyribonucleic acid (DNA). The adenosine deaminases (e.g., engineered adenosine deaminases, evolved adenosine deaminases) provided herein may be from any organism, such as a bacterium. In some embodiments, the deaminase or deaminase domain is a variant of a naturally-occurring deaminase from an organism. In some embodiments, the deaminase or deaminase domain does not occur in nature. For example, in some embodiments, the deaminase or deaminase domain is at least 50%, at least 55%, at least 60%, at least 65%, at least 70%, at least 75% at least 80%, at least 85%, at least 90%, at least 95%, at least 96%, at least 97%, at least 98%, at least 99%, or at least 99.5% identical to a naturally-occurring deaminase. In some embodiments, the adenosine deaminase is from a bacterium, such as E. coli, S. aureus, S. typhi, S. putrefaciens, H. influenzae, or C. crescentus. In some embodiments, the adenosine deaminase is a TadA deaminase. In some embodiments, the TadA deaminase is an E. coli TadA deaminase (ecTadA). In some embodiments, the TadA deaminase is a truncated E. coli TadA deaminase. For example, the truncated ecTadA may be missing one or more N-terminal amino acids relative to a full-length ecTadA. In some embodiments, the truncated ecTadA may be missing 1, 2, 3, 4, 5, 6, 7, 8, 9, 10, 11, 12, 13, 14, 15, 6, 17, 18, 19, or 20 N-terminal amino acid residues relative to the full length ecTadA. In some embodiments, the truncated ecTadA may be missing 1, 2, 3, 4, 5, 6, 7, 8, 9, 10, 11, 12, 13, 14, 15, 6, 17, 18, 19, or 20 C-terminal amino acid residues relative to the full length ecTadA. In some embodiments, the ecTadA deaminase does not comprise an N-terminal methionine. In some embodiments, the adenosine deaminase comprises the amino acid sequence of any one of SEQ ID NOs: 400-408. In some embodiments, the adenosine deaminase comprises the amino acid sequence of any one of SEQ ID NOs: 409-458.

[0061] In some embodiments, the TadA deaminase is an N-terminal truncated TadA. In certain embodiments, the adenosine deaminase comprises the amino acid sequence:

(SEQ ID NO: 400)
MSEVEFSHEYWMRHALTLAKRAWDEREVPVGAVLVHNNRVIGEGWNRPIG
RHDPTAHAEIMALRQGGLVMQNYRLIDATLYVTLEPCVMCAGAMIHSRIG
RVVFGARDAKTGAAGSLMDVLHHPGMNHRVEITEGILADECAALLSDFFR
MRRQEIKAQKKAQSSTD.

[0062] In some embodiments the TadA deaminase is a full-length E. coli TadA deaminase. For example, in certain embodiments, the adenosine deaminase comprises the amino acid sequence:

(SEQ ID NO: 401)
MRRAFITGVFFLSEVEFSHEYWMRHALTLAKRAWDEREVPVGAVLVHNNR
VIGEGWNRPIGRHDPTAHAEIMALRQGGLVMQNYRLIDATLYVTLEPCVM
CAGAMIHSRIGRVVFGARDAKTGAAGSLMDVLHHPGMNHRVEITEGILAD
ECAALLSDFFRMRRQEIKAQKKAQSSTD

[0063] It should be appreciated, however, that additional adenosine deaminases useful in the present application would be apparent to the skilled artisan and are within the scope of this disclosure. For example, the adenosine deaminase may be a homolog of an ADAT. Exemplary ADAT homologs include, without limitation:

Staphylococcus aureus TadA:
(SEQ ID NO: 402)
MGSHMTNDIYFMTLAIEEAKKAAQLGEVPIGAIITKDDEVIARAHNLRET
LQQPTAHAEHIAIERAAKVLGSWRLEGCTLYVTLEPCVMCAGTIVMSRIP
RVVYGADDPKGGCSGSLMNLLQQSNFNHRAIVDKGVLKEACSTLLTTFFK
NLRANKKSTN
Bacillus subtilis TadA:
(SEQ ID NO: 403)
MTQDELYMKEAIKEAKKAEEKGEVPIGAVLVINGEIIARAHNLRETEQRS
IAHAEMLVIDEACKALGTWRLEGATLYVTLEPCPMCAGAVVLSRVEKVVF
GAFDPKGGCSGTLMNLLQEERFNHQAEVVSGVLEEECGGMLSAFFRELRK
KKKAARKNLSE
Salmonella typhimurium TadA:
(SEQ ID NO: 404)
MPPAFITGVTSLSDVELDHEYWMRHALTLAKRAWDEREVPVGAVLVHNHR
VIGEGWNRPIGRHDPTAHAEIMALRQGGLVLQNYRLLDTTLYVTLEPCVM
CAGAMVHSRIGRVVFGARDAKTGAAGSLIDVLHHPGMNHRVEIIEGVLRD
ECATLLSDFFRMRRQEIKALKKADRAEGAGPAV
Shewanella putrefaciens TadA:
(SEQ ID NO: 405)
MDEYWMQVAMQMAEKAEAAGEVPVGAVLVKDGQQIATGYNLSISQHDPTA
HAEILCLRSAGKKLENYRLLDATLYITLEPCAMCAGAMVHSRIARVVYGA
RDEKTGAAGTVVNLLQHPAFNHQVEVTSGVLAEACSAQLSRFFKRRRDEK
KALKLAQRAQQGIE
Haemophilus influenzae F3031 (H. influenzae) TadA:
(SEQ ID NO: 406)
MDAAKVRSEFDEKMMRYALELADKAEALGEIPVGAVLVDDARNIIGEGWN
LSIVQSDPTAHAEIIALRNGAKNIQNYRLLNSTLYVTLEPCTMCAGAILH
SRIKRLVFGASDYKTGAIGSRFHFFDDYKMNHTLEITSGVLAEECSQKLS
TFFQKRREEKKIEKALLKSLSDK
Caulobacter crescentus TadA:
(SEQ ID NO: 407)
MRTDESEDQDHRMMRLALDAARAAAEAGETPVGAVILDPSTGEVIATAGN
GPIAAHDPTAHAEIAAMRAAAAKLGNYRLTDLTLVVTLEPCAMCAGAISH
ARIGRVVFGADDPKGGAVVHGPKFFAQPTCHWRPEVTGGVLADESADLLR
GFFRARRKAKI
Geobacter sulfurreducens TadA:
(SEQ ID NO: 408)
MSSLKKTPIRDDAYWMGKAIREAAKAAARDEVPIGAVIVRDGAVIGRGHN
LREGSNDPSAHAEMIAIRQAARRSANWRLTGATLYVTLEPCLMCMGAIIL
ARLERVVFGCYDPKGGAAGSLYDLSADPRLNHQVRLSPGVCQEECGTMLS
DFFRDLRRRKKAKATPALFIDERKVPPEP

[0064] It should be appreciated that, in some embodiments, effector domains may be used in place of any of the deaminases or deaminase domains provided herein. As used herein, an “effector domain” refers to a molecule (e.g., a protein) that regulates a biological activity and/or is capable of modifying a biological molecule (e.g., a protein, or a nucleic acid such as DNA or RNA). In some embodiments, the effector domain is a protein. In some embodiments, the effector domain is capable of modifying a protein (e.g., a histone). In some embodiments, the effector domain is capable of modifying DNA (e.g., genomic DNA). In some embodiments, the effector domain is capable of modifying RNA (e.g., mRNA). In some embodiments, the effector molecule is a nucleic acid editing domain. In some embodiments, the effector molecule is capable of regulating an activity of a nucleic acid (e.g., transcription, and/or translation). Exemplary effector domains include, without limitation, a deaminase, a nuclease, a nickase, a recombinase, a methyltransferase, a methylase, an acetylase, an acetyltransferase, a transcriptional activator, or a transcriptional repressor domain.

[0065] The term “effective amount,” as used herein, refers to an amount of a biologically active agent that is sufficient to elicit a desired biological response. For example, in some embodiments, an effective amount of a nuclease may refer to the amount of the nuclease that is sufficient to induce cleavage of a target site specifically bound and cleaved by the nuclease. In some embodiments, an effective amount of a fusion protein provided herein, e.g., of a fusion protein comprising a nuclease-inactive Cas9 domain and a nucleic acid editing domain (e.g., a deaminase domain) may refer to the amount of the fusion protein that is sufficient to induce editing of a target site specifically bound and edited by the fusion protein. As will be appreciated by the skilled artisan, the effective amount of an agent, e.g., a fusion protein, a nuclease, a deaminase, a recombinase, a hybrid protein, a protein dimer, a complex of a protein (or protein dimer) and a polynucleotide, or a polynucleotide, may vary depending on various factors as, for example, on the desired biological response, e.g., on the specific allele, genome, or target site to be edited, on the cell or tissue being targeted, and on the agent being used.

[0066] The term “expression” encompasses the processes by which nucleic acids (e.g., DNA) are transcribed to produce RNA, and (where applicable) RNA transcripts are processed and translated into polypeptides.

[0067] The term “gene” as used herein refers to a nucleic acid sequence (e.g., DNA or RNA) that encodes a molecule (e.g., a protein). In general, a gene is a double-stranded DNA molecule that encodes a protein. A gene generally comprises coding DNA sequences (e.g., exons), non-coding DNA sequences (e.g., introns), and one or more promoters or other regulatory element that controls gene expression. An organism's entire set of genes is referred as its genome.

[0068] In some embodiments, the gene is a reporter gene. In general, a reporter gene is often used to study the activity (e.g., expression) of a regulatory sequence of interest (e.g., a promoter). In some embodiments, the reporter gene is operably linked to a regulatory sequence (e.g., a promoter). Exemplary, non-limiting examples of a reporter gene include the lacz gene, which encodes beta-galactosidase, the cat gene, which encodes chloramphenicol acetyltransfersase (Cat), the gfp gene, which encodes green fluorescent protein (GFP, or EGFP), and the rfp gene, which encodes red fluorescent protein (RFP). In some embodiments, the reporter gene encodes a reporter protein. In general, a reporter protein is a protein whose expression is operably linked to a promoter or gene of interest. The expression of a reporter protein generally indicates that the promoter or gene of interest is being expressed in a cell. In some embodiments, the reporter protein is a fluorescent protein. In some embodiments, the fluorescent protein is a green fluorescent protein (GFP). In some embodiments, the fluorescent protein is an enhanced green fluorescent protein (EGFP). In some embodiments, the fluorescent protein is a red fluorescent protein (RFP).

[0069] The term “locus” (plural “loci”) as used herein refers to a fixed position on a chromosome, such as the position of a gene or marker (i.e., genetic marker). A variant of a similar DNA sequence located at a given locus is called an allele. In some embodiments, the locus is a safe harbor locus. The term “safe harbor locus” refers to a position on the chromosome (i.e., locus) that can tolerate the insertion, deletion, and/or mutation of the nucleic acid sequence in the safe harbor locus without perturbing the endogenous activity of the gene or risking the integrity of the host genome. In some embodiments, a gene is located in a safe harbor locus (i.e., a safe harbor gene). In some embodiments, the gene is the chemokine (C-C motif) receptor 5 (CCR5) gene. In some embodiments, the gene is the adeno-associated virus site 1 (AAVS1) gene. In some embodiments, the safe harbor locus is the Rosa26 locus (e.g., from mice, or the human ortholog). Safe harbor genes are described in, e.g., Papapetrou E P and Schambach A (2016) Gene insertion into genomic safe harbors for human gene therapy. Mol Ther 24(4), 678-684, which is incorporated by reference herein. In some embodiments, a safe harbor locus is used as a recording locus as described herein.

[0070] The term “linker,” as used herein, refers to a chemical group or a molecule linking two molecules or moieties, e.g., two domains of a fusion protein, such as, for example, a nuclease-inactive Cas9 domain and a nucleic acid editing domain (e.g., a deaminase domain). A linker may be, for example, an amino acid sequence, a peptide, or a polymer of any length and composition. In some embodiments, a linker joins a gRNA binding domain of an RNA-programmable nuclease, including a Cas9 nuclease domain, and the catalytic domain of a nucleic-acid editing protein. In some embodiments, a linker joins a dCas9 and a nucleic-acid editing protein. In some embodiments, a linker joins a Cas9n and a nucleic-acid editing protein. In some embodiments, a linker joins an RNA-programmable nuclease domain and a UGI domain. In some embodiments, a linker joins a dCas9 and a UGI domain. In some embodiments, a linker joins a Cas9n and a UGI domain. Typically, the linker is positioned between, or flanked by, two groups, molecules, or other moieties and connected to each one via a covalent bond, thus connecting the two. In some embodiments, the linker is an amino acid or a plurality of amino acids (e.g., a peptide or protein). In some embodiments, the linker is an organic molecule, group, polymer, or chemical moiety. In some embodiments, the linker comprises the amino acid sequence of any one of SEQ ID NOs: 300-318. In some embodiments, the linker is 1-100 amino acids in length, for example, 1, 2, 3, 4, 5, 6, 7, 8, 9, 10, 11, 12, 13, 14, 15, 16, 17, 18, 19, 20, 21, 22, 23, 24, 25, 26, 27, 28, 29, 30, 30-35, 35-40, 40-45, 45-50, 50-60, 60-70, 70-80, 80-90, 90-100, 100-150, or 150-200 amino acids in length. Longer or shorter linkers are also contemplated. In some embodiments, a linker comprises the amino acid sequence SGSETPGTSESATPES (SEQ ID NO: 306), which may also be referred to as the XTEN linker. In some embodiments, a linker comprises the amino acid sequence SGGS (SEQ ID NO: 309). In some embodiments, a linker comprises the amino acid sequence (SGGS)₂—SGSETPGTSESATPES-(SGGS)₂ (SEQ ID NO: 308), which may also be referred to as (SGGS)₂—XTEN-(SGGS)₂. In some embodiments, a linker comprises (SGGS)ₙ (SEQ ID NO: 305), (GGGS)ₙ (SEQ ID NO: 300), (GGGGS)ₙ (SEQ ID NO: 301), (G)ₙ (SEQ ID NO: 302), (EAAAK)ₙ (SEQ ID NO: 303), (GGS)ₙ (SEQ ID NO: 304), SGGS(GGS)ₙ (SEQ ID NO: 307), (SGGS)ₙ-SGSETPGTSESATPES-(SGGS)ₙ (SEQ ID NO: 310), or (XP)ₙ motif (SEQ ID NO: 805), or a combination of any of these, wherein n is independently an integer between 1 and 30, and wherein X is any amino acid. In some embodiments, n is 1, 2, 3, 4, 5, 6, 7, 8, 9, 10, 11, 12, 13, 14, or 15. In some embodiments, n is 1, 3, or 7. In some embodiments, the linker comprises the amino acid sequence

(SEQ ID NO: 314)
GGSGGSPGSPAGSPTSTEEGTSESATPESGPGTSTEPSEGSAPGSPAGSP
TSTEEGTSTEPSEGSAPGTSTEPSEGSAPGTSESATPESGPGSEPATSGG
SGGS,
(SEQ ID NO: 315)
SGGSSGGSSGSETPGTSESATPES,
(SEQ ID NO: 316)
SGGSSGGSSGSETPGTSESATPESSGGSSGGSSGGSSGGS,
(SEQ ID NO: 317)
SGGSSGGSSGSETPGTSESATPESSGGSSGGSSGGSSGGSSGSETPGTSE
SATPESSGGSSGGS,
or
(SEQ ID NO: 318)
PGSPAGSPTSTEEGTSESATPESGPGTSTEPSEGSAPGSPAGSPTSTEEG
TSTEPSEGSAPGTSTEPSEGSAPGTSESATPESGPGSEPATS.

[0071] The term “mutation,” as used herein, refers to a substitution of a residue within a sequence, e.g., a nucleic acid or amino acid sequence, with another residue, or a deletion or insertion of one or more residues within a sequence. Mutations are typically described herein by identifying the original residue followed by the position of the residue within the sequence and by the identity of the newly substituted residue. Various methods for making the nucleic acid and amino acid substitutions (mutations) provided herein are well known in the art, and are provided by, for example, Green and Sambrook, Molecular Cloning: A Laboratory Manual (4^{th} ed., Cold Spring Harbor Laboratory Press, Cold Spring Harbor, N.Y. (2012)).

[0072] The terms “nucleic acid” and “nucleic acid molecule,” as used herein, refer to a compound comprising a nucleobase and an acidic moiety, e.g., a nucleoside, a nucleotide, or a polymer of nucleotides. Typically, polymeric nucleic acids, e.g., nucleic acid molecules comprising three or more nucleotides are linear molecules, in which adjacent nucleotides are linked to each other via a phosphodiester linkage. In some embodiments, “nucleic acid” refers to individual nucleic acid residues (e.g. nucleotides and/or nucleosides). In some embodiments, “nucleic acid” refers to an oligonucleotide chain comprising three or more individual nucleotide residues. As used herein, the terms “oligonucleotide” and “polynucleotide” can be used interchangeably to refer to a polymer of nucleotides (e.g., a string of at least three nucleotides). In some embodiments, “nucleic acid” encompasses RNA as well as single and/or double-stranded DNA. Nucleic acids may be naturally occurring, for example, in the context of a genome, a transcript, an mRNA, tRNA, rRNA, siRNA, snRNA, a plasmid, cosmid, chromosome, chromatid, or other naturally occurring nucleic acid molecule. On the other hand, a nucleic acid molecule may be a non-naturally occurring molecule, e.g., a recombinant DNA or RNA, an artificial chromosome, an engineered genome, or fragment thereof, or a synthetic DNA, RNA, DNA/RNA hybrid, or including non-naturally occurring nucleotides or nucleosides.

[0073] Furthermore, the terms “nucleic acid,” “DNA,” “RNA,” and/or similar terms include nucleic acid analogs, e.g., analogs having other than a phosphodiester backbone. Nucleic acids can be purified from natural sources, produced using recombinant expression systems and optionally purified, chemically synthesized, etc. Where appropriate, e.g., in the case of chemically synthesized molecules, nucleic acids can comprise nucleoside analogs such as analogs having chemically modified bases or sugars, and backbone modifications. A nucleic acid sequence is presented in the 5′ to 3′ direction unless otherwise indicated. In some embodiments, a nucleic acid is or comprises natural nucleosides (e.g. adenosine, thymidine, guanosine, cytidine, uridine, deoxyadenosine, deoxythymidine, deoxyguanosine, and deoxycytidine); nucleoside analogs (e.g., 2-aminoadenosine, 2-thiothymidine, inosine, pyrrolo-pyrimidine, 3-methyl adenosine, 5-methylcytidine, 2-aminoadenosine, C5-bromouridine, C5-fluorouridine, C5-iodouridine, C5-propynyl-uridine, C5-propynyl-cytidine, C5-methylcytidine, 2-aminoadenosine, 7-deazaadenosine, 7-deazaguanosine, 8-oxoadenosine, 8-oxoguanosine, 0(6)-methylguanine, and 2-thiocytidine); chemically modified bases; biologically modified bases (e.g., methylated bases); intercalated bases; modified sugars (e.g., 2′-fluororibose, ribose, 2′-deoxyribose, arabinose, and hexose); and/or modified phosphate groups (e.g., phosphorothioates and 5′-N-phosphoramidite linkages).

[0074] The term “nucleic acid editing domain,” as used herein refers to a protein or enzyme capable of making one or more modifications (e.g., deamination of a cytidine residue) to a nucleic acid (e.g., DNA or RNA). Exemplary nucleic acid editing domains include, but are not limited to a deaminase, a nuclease, a nickase, a recombinase, a methyltransferase, a methylase, an acetylase, an acetyltransferase, a transcriptional activator, or a transcriptional repressor domain. In some embodiments, the nucleic acid editing domain is a deaminase, a nuclease, a nickase, a recombinase, a methyltransferase, a methylase, an acetylase, an acetyltransferase, a transcriptional activator, or a transcriptional repressor domain. In some embodiments, the nucleic acid editing domain is a deaminase domain (e.g., a cytidine deaminase, such as an APOBEC or an AID deaminase, or an adenosine deaminase, such as ecTadA). In some embodiments, the nucleic acid editing domain is a cytidine deaminase domain (e.g., an APOBEC or an AID deaminase). In some embodiments, the nucleic acid editing domain is an adenosine deaminase domain (e.g., an ecTadA).

[0075] The term “nuclear localization sequence” or “NLS” refers to an amino acid sequence that promotes import of a protein into the cell nucleus, for example, by nuclear transport. Nuclear localization sequences are known in the art and would be apparent to the skilled artisan. For example, NLS sequences are described in Plank et al., international PCT application, PCT/EP2000/011690, filed Nov. 23, 2000, published as WO/2001/038547 on May 31, 2001, the contents of which are incorporated herein by reference for their disclosure of exemplary nuclear localization sequences. In some embodiments, a NLS comprises the amino acid sequence PKKKRKV (SEQ ID NO: 520) or MDSLLMNRRKFLYQFKNVRWAKGRRETYLC (SEQ ID NO: 521).

[0076] The terms “protein,” “peptide,” and “polypeptide” are used interchangeably herein, and refer to a polymer of amino acid residues linked together by peptide (amide) bonds. The terms refer to a protein, peptide, or polypeptide of any size, structure, or function. Typically, a protein, peptide, or polypeptide will be at least three amino acids long. A protein, peptide, or polypeptide may refer to an individual protein or a collection of proteins. One or more of the amino acids in a protein, peptide, or polypeptide may be modified, for example, by the addition of a chemical entity such as a carbohydrate group, a hydroxyl group, a phosphate group, a farnesyl group, an isofarnesyl group, a fatty acid group, a linker for conjugation, functionalization, or other modification, etc. A protein, peptide, or polypeptide may also be a single molecule or may be a multi-molecular complex. A protein, peptide, or polypeptide may be just a fragment of a naturally occurring protein or peptide. A protein, peptide, or polypeptide may be naturally occurring, recombinant, or synthetic, or any combination thereof. The term “fusion protein” as used herein refers to a hybrid polypeptide which comprises protein domains from at least two different proteins. One protein may be located at the amino-terminal (N-terminal) portion of the fusion protein or at the carboxy-terminal (C-terminal) protein thus forming an “amino-terminal fusion protein” or a “carboxy-terminal fusion protein,” respectively. A protein may comprise different domains, for example, a nucleic acid programmable DNA binding domain (e.g., the gRNA binding domain of Cas9 that directs the binding of the protein to a target site) and a nucleic acid cleavage domain or a catalytic domain of a nucleic-acid editing protein. In some embodiments, a protein comprises a proteinaceous part, e.g., an amino acid sequence constituting a nucleic acid binding domain, and an organic compound, e.g., a compound that can act as a nucleic acid cleavage agent. In some embodiments, a protein is in a complex with, or is in association with, a nucleic acid, e.g., RNA. Any of the proteins provided herein may be produced by any method known in the art. For example, the proteins provided herein may be produced via recombinant protein expression and purification, which is especially suited for fusion proteins comprising a peptide linker. Methods for recombinant protein expression and purification are well known, and include those described by Green and Sambrook, Molecular Cloning: A Laboratory Manual (4^{th} ed., Cold Spring Harbor Laboratory Press, Cold Spring Harbor, N.Y. (2012)), the entire contents of which are incorporated herein by reference.

[0077] The term “promoter” as used herein refers to a control region of a nucleic acid sequence (e.g., within a plasmid) at which initiation and rate of transcription of the remainder of a nucleic acid sequence are controlled. A promoter may also contain sub-regions to which regulatory proteins and molecules may bind, such as RNA polymerase and other transcription factors. In some embodiments, a promoter controls the expression of a nucleic acid sequence (e.g., a gene) that is operably linked to the promoter. A promoter is located on the same strand and upstream of the nucleic acid sequence (e.g., gene) that is operably linked to the promoter. In general, promoters are between 100-1000 base pairs long. In some embodiments, the promoter is a promoter suitable for use in a prokaryotic system (i.e., a bacterial promoter). In some embodiments, the promoter is a promoter suitable for use in a eukaryotic system (i.e., a eukarytotic promoter). In some embodiments, the promoter is a promoter suitable for use in a mammalian (e.g., human) system (i.e., a mammalian promoter). In some embodiments, the promoter is induced by a stimulus (i.e., an inducible promoter). In some embodiments, the stimulus is a small molecule, a protein, a peptide, an amino acid, a metabolite, an inorganic molecule, an organometallic molecule, an organic molecule, a drug or drug candidate, a sugar, a lipid, a metal, a nucleic acid, a molecule produced during the activation of an endogenous or an exogenous signaling cascade, light, heat, sound, pressure, mechanical stress, shear stress, or a virus or other microorganism, change in pH, or change in oxidation/reduction state. In some embodiments, the stimulus is a light. In some embodiments, the stimulus is a virus. In some embodiments, the stimulus is a small molecule. In some embodiments, the stimulus is an antibiotic. In some embodiments, the stimulus is anhydrotetracycline, tanespimycin, tunicamycin, or doxycycline. In some embodiments, the stimulus is a sugar. In some embodiments, the stimulus is arabinose, rhamnose, or IPTG. In some embodiments, the stimulus is a signaling molecule produced during an activated signaling cascade (e.g., beta-catenin produced during an activated Wnt signaling cascade, cytokines such as TNFα, TGF-β1, IFN-α, IFN-γ, or IL-6 produced during immunological and inflammatory responses, or growth factors such as EGF). In some embodiments, the stimulus is a cancer drug. In some embodiments, the stimulus is a vitamin. In some embodiments, the stimulus is a steroid. Additional promoters that detect signaling moelcules can be generated to induce the expression of the nucleic acid sequence operably linked to the promoter, for example, promoters that record an endogenous pathway, including immune response (IL-2 promoter), a cAMP responsive element (CREB), NFκB signaling, interferon response, P53 (DNA damage), Sox2, TGF-ß signaling (SMAD), Erk (e.g., from an activated Ras/Raf/Mek/Erk cascade), PI3K/AKT (e.g., from an activated Ras/PI3K/Akt cascade), heat shock, Notch signaling, Oct4, an aryl hydrocarbon receptor, or an AP-1 transcription factor. In some embodiments, the promoter is a constitutive promoter. In some embodiments, the promoter is a promoter listed in Table 3. Non-limiting, exemplary constitutive and inducible bacterial promoters are shown in Table 7. Non-limiting, exemplary constitutive and inducible eukaryotic promoters are shown in Table 8 and Table 10. Additional suitable promoters for use in both prokaryotic and eukaryotic systems will be apparent to those of ordinary skill in the art based on this disclosure and knowledge in the field, and are within the scope of the present disclosure.

[0078] The term “repressor” as used herein refers to a DNA- or RNA-binding protein that binds to a repressor binding site (e.g., an operator, a promoter, or a silencing sequence) to inhibit the expression of one or more genes. A DNA-binding repressor blocks the attachment of RNA polymerase to the promoter, thus preventing transcription of the downstream nucleic acid sequence (e.g., gene) operably linked to the promoter into messenger RNA and consequent expression of the protein encoded by the gene. An inducer, i.e., a molecule that initiates the gene expression, can interact with the repressor protein and detach it from the operator (e.g., the promoter). In some embodiments, the repressor is a LacI repressor that represses the expression of a nucleic acid sequence operably linked to a lactose-inducible (e.g., an IPTG-inducible) promoter. In some embodiments, the repressor is a tetracycline repressor (Tet_{R}) that represses the expression of a nucleic acid sequence operably linked to a tetracycline-inducible promoter. Additional suitable repressor systems will be apparent to those of ordinary skill in the art based on this disclosure and knowledge in the field, and are within the scope of the present disclosure.

[0079] The term “plasmid” as used herein refers to a circular, double-stranded DNA molecule comprising an origin of replication. When present in a cell, a plasmid is separate and distinct from the host chromosomal DNA, where the host may be, for example, a bacterial cell (e.g., Escherichia coli) or a eukaryotic cell (e.g., mammalian (e.g., human) cell). In general, a plasmid may be introduced into a cell via a transfection reaction (e.g., transformation, electroporation, heat shock), or other suitable technique known in the field of molecular biology. In some embodiments, a plasmid is transfected into a cell using a cationic lipid. In some embodiments, the cationic lipid is Lipofectamine® 2000. Additional suitable cationic lipid reagents are described in Patent Publication No. WO2016/070129, published May 6, 2016, which is hereby incorporated by reference. Plasmids are often used in molecular cloning as a tool to drive the replication and expression of recombinant DNA sequences within host organisms. In some embodiments, the plasmid is expressed in a cell. In some embodiments, any of the plasmids described herein can comprise a nucleic acid sequence encoding an additional protein (e.g., a reporter protein or a repressor protein). In some embodiments, the nucleic acid sequence encoding the additional protein is separated from a nucleic acid sequence encoding another component (e.g., sgRNA, napDNAbp, fusion protein) in the plasmid by an intervening P2A sequence. Without wishing to be bound by any particular theory, a P2A sequence is used in engineered plasmids to permit a nucleic acid sequence encoding two distinct gene products operably linked to the same promoter to express the two gene products without having to reinitiate transcription (i.e., the ribosome does not release from the nucleic acid after it has transcribed the first gene product). In some embodiments, the plasmid comprises an additional nucleic acid sequence encoding an additional protein (e.g., a reporter protein or repressor protein) connected to the 3′ end of any one of the nucleic acid sequences in the plasmid by an intervening P2A sequence.

[0080] In some embodiments, the plasmid is a writing plasmid. In some embodiments, the writing plasmid is a circular, double-stranded DNA molecule that comprises a nucleic acid (i.e., DNA) sequence encoding a nucleic acid programmable DNA binding protein (napDNAbp) and a nucleic acid (i.e., DNA) sequence encoding a sgRNA. In some embodiments, the napDNAbp is a Cas9 domain. In some embodiments, the Cas9 domain is a nuclease active Cas9 domain, a Cas9n domain, or a dCas9 domain. In some embodiments, the nucleic acid sequence encoding the nucleic acid programmable DNA binding protein (napDNAbp) is operably linked to a promoter. In some embodiments, the nucleic acid sequence encoding the sgRNA is operably linked to a promoter. In some embodiments, a writing plasmid comprises a Cas9 domain (e.g., dCas9, Cas9n, nuclease active Cas9) and a nucleic acid (i.e., DNA) sequence encoding a sgRNA. In some embodiments, the nucleic acid sequence encoding the Cas9 domain (e.g., dCas9, Cas9n, nuclease active Cas9) is operably linked to a promoter. In some embodiments, the nucleic acid sequence encoding the sgRNA is operably linked to a promoter. In some embodiments, a writing plasmid comprises more than one nucleic acid sequence encoding a napDNAbp, wherein each nucleic acid sequence is operably linked to a promoter. In some embodiments, a writing plasmid comprises more than one nucleic acid sequence encoding more than one sgRNAs, wherein each nucleic acid sequence is operably linked to a promoter. In some embodiments, the writing plasmid does not comprise a nucleic acid sequence encoding a sgRNA. In some embodiments, any of the nucleic acid sequences encoding an sgRNA in the writing plasmid can alternatively be included in a separate plasmid (e.g., an “accessory plasmid”) for use with the appropriate writing plasmid. In some embodiments, the writing plasmid comprises an additional nucleic acid sequence encoding an additional protein (e.g., a reporter protein or repressor protein) connected to the 3′ end of any one of the nucleic acid sequences in the writing plasmid by an intervening P2A sequence.

[0081] In some embodiments, the writing plasmid is a circular, double-stranded DNA molecule that comprises a nucleic acid (i.e., DNA) sequence encoding a fusion protein and a nucleic acid (i.e., DNA) sequence encoding a sgRNA. In some embodiments, the fusion protein comprises a nucleic acid programmable DNA binding protein (napDNAbp) and a nucleic acid editing domain. In some embodiments, the nucleic acid sequence encoding the fusion protein is operably linked to a promoter. In some embodiments, the nucleic acid sequence encoding the sgRNA is operably linked to a promoter. In some embodiments, the fusion protein comprises a Cas9 domain (e.g., dCas9, Cas9n, nuclease active Cas9) and nucleic acid editing domain. In some embodiments, a writing plasmid comprises more than one nucleic acid sequence encoding a fusion protein comprising a napDNAnp and a nucleic acid editing domain, wherein each nucleic acid sequence is operably linked to a promoter. In some embodiments, the writing plasmid comprises a fusion protein comprising a napDNAbp (e.g., a Cas9 domain) and a fusion protein comprising an orthogonal napDNAbp (e.g., an orthogonal Cas9 domain), wherein the two napDNAbps require different sgRNA binding parameters. In some embodiments, a writing plasmid comprises more than one nucleic acid sequence encoding more than one sgRNA, wherein each nucleic acid sequence is operably linked to a promoter. In some embodiments, the writing plasmid does not comprise a nucleic acid sequence encoding a sgRNA.

[0082] In some embodiments, the plasmid is a recording plasmid. The term “recording plasmid” as used herein refers to a circular, double-stranded DNA molecule that comprises a target sequence. In some embodiments, the target sequence is complementary to a sgRNA sequence provided herein, for example, a sgRNA sequence comprising a nucleic acid sequence shown in Table 5. In some embodiments, the target sequence is present in a reporter gene. In some embodiments, the reporter gene is EFGP. In some embodiments, the target sequence encodes a protein. In some embodiments, the protein is a reporter protein, for example, a fluorescent protein. In some embodiments, the reporter protein is a green fluorescent protein (GFP). In some embodiments, the protein is an antibiotic resistance protein, or variant thereof. In some embodiments, the antibiotic resistance protein is chloramphenicol acetyltransferase (Cat). In some embodiments, the antibiotic resistance protein is a Cat variant (e.g., the Cat variant comprises one or more inactivating mutations). In some embodiments, the Cat variant does not confer chloramphenicol resistance. In some embodiments, the antibiotic resistance protein is aminoglycoside-3′-phosphotransferase (Aph3′). In some embodiments, the antibiotic resistance protein is an Aph3′ variant (e.g., the Aph3′ protein comprises one or more inactivating mutations). In some embodiments, the Aph3′ variant does not confer kanamycin resistance.

[0083] The term “origin of replication” as used herein refers to a sequence at which replication (e.g., DNA transcription) is initiated. The DNA sequence of the origin of replication (ORI) varies among species, but in general comprises a high content of both adenine (A) and thymine (T). The term origin of replication encompasses both prokaryotic (e.g., bacterial) and eukaryotic (e.g., mammalian) origins of replication. In general, a plasmid comprises at least one origin of replication. In some embodiments, a plasmid comprises one origin of replication.

[0084] The term “subject,” as used herein, refers to an individual organism, for example, an individual mammal. In some embodiments, the subject is a human. In some embodiments, the subject is a non-human mammal. In some embodiments, the subject is a non-human primate. In some embodiments, the subject is a rodent. In some embodiments, the subject is a sheep, a goat, a cattle, a cat, or a dog. In some embodiments, the subject is a vertebrate, an amphibian, a reptile, a fish, an insect, a fly, or a nematode. In some embodiments, the subject is a research animal. In some embodiments, the subject is genetically engineered, e.g., a genetically engineered non-human subject. The subject may be of either sex and at any stage of development.

[0085] The term “target site” refers to, in some embodiments, a sequence within a nucleic acid molecule that is deaminated by a deaminase or a fusion protein comprising a deaminase, (e.g., a dCas9-deaminase fusion protein or a Cas9n-deaminase fusion protein provided herein). In some embodiments, the target site refers to a sequence within a nucleic acid molecule that is cleaved by a napDNAbp (e.g., a nuclease active Cas9 domain) provided herein. The target site is contained within a target sequence (e.g., a target sequence comprising a reporter gene, or a target sequence comprising a gene located in a safe harbor locus).

[0086] The term “recombinant” as used herein in the context of proteins or nucleic acids refers to proteins or nucleic acids that do not occur in nature, but are the product of human engineering. For example, in some embodiments, a recombinant protein or nucleic acid molecule comprises an amino acid or nucleotide sequence that comprises at least one, at least two, at least three, at least four, at least five, at least six, or at least seven mutations as compared to any naturally occurring sequence.

[0087] The term “pharmaceutical composition,” as used herein, refers to a composition that can be administrated to a subject in the context of treatment of a disease or disorder. In some embodiments, a pharmaceutical composition comprises an active ingredient, e.g., a nuclease or a nucleic acid encoding a nuclease, and a pharmaceutically acceptable excipient.

[0088] The term “uracil glycosylase inhibitor” or “UGI,” as used herein, refers to a protein that is capable of inhibiting a uracil-DNA glycosylase base-excision repair enzyme. In some embodiments, a UGI domain comprises a wild-type UGI or a UGI as set forth in SEQ ID NO: 500. In some embodiments, the UGI proteins provided herein include fragments of UGI and proteins homologous to a UGI or a UGI fragment. For example, in some embodiments, a UGI domain comprises a fragment of the amino acid sequence set forth in SEQ ID NO: 500. In some embodiments, a UGI fragment comprises an amino acid sequence that comprises at least 60%, at least 65%, at least 70%, at least 75%, at least 80%, at least 85%, at least 90%, at least 95%, at least 96%, at least 97%, at least 98%, at least 99%, or at least 99.5% of the amino acid sequence as set forth in SEQ ID NO: 500. In some embodiments, a UGI comprises an amino acid sequence homologous to the amino acid sequence set forth in SEQ ID NO: 500, or an amino acid sequence homologous to a fragment of the amino acid sequence set forth in SEQ ID NO: 500. In some embodiments, proteins comprising UGI or fragments of UGI or homologs of UGI or UGI fragments are referred to as “UGI variants.” A UGI variant shares homology to UGI, or a fragment thereof. For example a UGI variant is at least 70% identical, at least 75% identical, at least 80% identical, at least 85% identical, at least 90% identical, at least 95% identical, at least 96% identical, at least 97% identical, at least 98% identical, at least 99% identical, at least 99.5% identical, or at least 99.9% identical to a wild type UGI or a UGI as set forth in SEQ ID NO: 500. In some embodiments, the UGI variant comprises a fragment of UGI, such that the fragment is at least 70% identical, at least 80% identical, at least 90% identical, at least 95% identical, at least 96% identical, at least 97% identical, at least 98% identical, at least 99% identical, at least 99.5% identical, or at least 99.9% to the corresponding fragment of wild-type UGI or a UGI as set forth in SEQ ID NO: 500. In some embodiments, the UGI comprises the amino acid sequence of SEQ ID NO: 500, as set forth below.

Exemplary Uracil-DNA glycosylase inhibitor
(UGI; >sp|P14739|UNGI_BPPB2)
(SEQ ID NO: 500)
MTNLSDIIEKETGKQLVIQESILMLPEEVEEVIGNKPESDILVHTAYDE
STDENVMLLTSDAPEYKPWALVIQDSNGENKIKML

[0089] The term “catalytically inactive inosine-specific nuclease,” or “dead inosine-specific nuclease (dISN),” as used herein, refers to a protein that is capable of inhibiting an inosine-specific nuclease. Without wishing to be bound by any particular theory, catalytically inactive inosine glycosylases (e.g., alkyl adenine glycosylase [AAG]) will bind inosine, but will not create an abasic site or remove the inosine, thereby sterically blocking the newly-formed inosine moiety from DNA damage/repair mechanisms. In some embodiments, the catalytically inactive inosine-specific nuclease may be capable of binding an inosine in a nucleic acid but does not cleave the nucleic acid. Exemplary catalytically inactive inosine-specific nucleases include, without limitation, catalytically inactive alkyl adenosine glycosylase (AAG nuclease), for example, from a human, and catalytically inactive endonuclease V (EndoV nuclease), for example, from E. coli. In some embodiments, the catalytically inactive AAG nuclease comprises an E125Q mutation as shown in SEQ ID NO: 510, or a corresponding mutation in another AAG nuclease. In some embodiments, the catalytically inactive AAG nuclease comprises the amino acid sequence set forth in SEQ ID NO: 510. In some embodiments, the catalytically inactive EndoV nuclease comprises an D35A mutation as shown in SEQ ID NO: 511, or a corresponding mutation in another EndoV nuclease. In some embodiments, the catalytically inactive EndoV nuclease comprises the amino acid sequence set forth in SEQ ID NO: 511. It should be appreciated that other catalytically inactive inosine-specific nucleases (dISNs) would be apparent to the skilled artisan and are within the scope of this disclosure.

Truncated AAG (H. sapiens) nuclease (E125Q);
mutated residue shown in bold.
(SEQ ID NO: 510)
KGHLTRLGLEFFDQPAVPLARAFLGQVLVRRLPNGTELRGRIVETQAYLG
PEDEAAHSRGGRQTPRNRGMFMKPGTLYVYIIYGMYFCMNISSQGDGACV
LLRALEPLEGLETMRQLRSTLRKGTASRVLKDRELCSGPSKLCQALAINK
SFDQRDLAQDEAVWLERGPLEPSEPAVVAAARVGVGHAGEWARKPLRFYV
RGSPWVSVVDRVAEQDTQA
EndoV nuclease (D35A); mutated residue shown in
bold.
(SEQ ID NO: 511)
DLASLRAQQIELASSVIREDRLDKDPPDLIAGAAVGFEQGGEVTRAAMVL
LKYPSLELVEYKVARIATTMPYIPGFLSFREYPALLAAWEMLSQKPDLVF
VDGHGISHPRRLGVASHFGLLVDVPTIGVAKKRLCGKFEPLSSEPGALAP
LMDKGEQLAWVWRSKARCNPLFIATGHRVSVDSALAWVQRCMKGYRLPEP
TRWADAVASERPAFVRYTANQP

### DETAILED DESCRIPTION OF CERTAIN EMBODIMENTS

[0090] Provided herein are compositions (e.g., nucleic acids), cells, systems, kits, and methods for recording the strength and/or duration of endogenous or exogenous stimuli over the course of a cell's lifetime. Some aspects of the disclosure provide a cell data recording system comprising a nucleic acid programmable DNA binding protein (napDNAbp) (e.g., a Cas9 domain) or a fusion protein comprising a nucleic acid programmable DNA binding protein and a nucelic acid editing domain (e.g., a base editor) operably linked to a promoter that induces the expression of the napDNA or the fusion protein to induce changes in cellular DNA (e.g., double-strand breaks, nucleobase editing) in response to a stimulus or change in cell. In contrast to digital memory devices that store information (e.g., the presence or absence of a stimulus) in one of two distinct states (i.e., “on” or “off”), these cell data recorders can induce permanent marks in cellular DNA in a manner that reflects both the strength (i.e., amplitude) and duration of one or more stimuli. Thus, in some aspects, provided herein are analog, multi-event cell data recording systems (also referred to as a “CRISPR-mediated analog multi-event recording apparatus” or “CAMERA”) that have the ability to simultaneously record multiple cell states, including, for example, exposure to a small molecule, a protein, a peptide, an amino acid, a metabolite, an inorganic molecule, an organometallic molecule, an organic molecule, a drug or drug candidate, a sugar, a lipid, a metal, a nucleic acid, a molecule produced during the activation of an endogenous or an exogenous signaling cascade, light, heat, sound, pressure, mechanical stress, shear stress, or a virus or other microorganism. Importantly, these cell data recorders employ sequencing technologies (e.g., high-throughput sequencing) to measure readout (e.g., changes in cellular DNA) and are not dependent on large cell populations for both the recording of a stimulus or the readout of the change(s) in cellular DNA induced by the stimulus.

[0091] In certain embodiments, the cell data recorder systems provided herein for use in a cell comprise one or more writing plasmids or writing loci (e.g., as part of an integrated writing system), wherein each writing plasmid or writing locus encodes a nucleic acid programmable DNA binding protein (napDNAbp) or a fusion protein comprising a napDNAbp and a nucleic acid editing domain. The nucleic acid sequence of the writing plasmid/locus that encodes the napDNAbp or the fusion protein is operably linked to a promoter (e.g., an inducible promoter or a constitutive promoter). When a stimulus is present, or a change in cell state occurs, the stimulus induces the expression of the napDNAbp or the fusion protein encoded by the writing plasmid/locus. Also present within the cell is a guide RNA (gRNA or sgRNA) that associates with the napDNAbp and directs the napDNAbp or the fusion protein to a target sequence (i.e., the sgRNA is complementary to a target sequence). The sgRNA may be encoded by the writing plasmid/locus or by another plasmid/locus (e.g., an accessory plasmid) that is used in combination with the writing plasmid/locus, or the sgRNA may be expressed by the cell. When the sgRNA is encoded by a plasmid/locus (e.g., writing plasmid/locus, accessory plasmid), the nucleic acid sequence encoding the sgRNA may be operably linked to a promoter (e.g., an inducible promoter or a constitutive promoter). Under the correct stimulus, or correct set of stimuli, both the napDNAbp or the fusion protein and the sgRNA are expressed in the cell, and the sgRNA associates with the napDNAbp to direct the napDNAbp or the fusion protein to a target sequence. This target sequence records the activity of the napDNAbp (e.g., double-strand breaks) or the fusion protein (e.g., nucleobase editing), thereby recording the presence of a stimulus, or a set of stimuli, or a change in cell state. Additional sgRNA sequences can also be present in the cell (e.g., provided by the writing plasmid/locus, an accessory plasmid, a separate locus, or expressed in the cell), and these additional sgRNA sequences, which can direct the napDNAbp or the fusion protein to a distinct target sequence, can each be operably linked to a promoter that senses the presence of a different stimulus, allowing complex cell data recorder systems to be constructed for the ordered recording of the presence and duration of a stimulus, or set of stimuli. In some cases, one or more of the components of the cell data recorder system (e.g., napDNAbp, fusion protein, sgRNA) may be constitutively expressed in the cell. Exemplary writing plasmids, writing loci, recording plasmids, recording loci, additional plasmids (e.g., accessory plasmids) for use with the compositions described herein, and cell data recorder systems are provided. Additional suitable combinations of the writing plasmids, writing loci, recording plasmids, recording loci, additional plasmids (e.g., accessory plasmids) provided herein will be apparent to a person of ordinary skill in the art based on this disclosure and knowledge in the field, and thus are embraced by the scope of this disclosure.

### Writing Plasmids

[0092] In one aspect, the present disclosure provides writing plasmids comprising a nucleic acid sequence encoding a nucleic acid programmable DNA binding protein (napDNAbp) operably linked to a promoter. This napDNAbp may be a nuclease active napDNAbp (e.g., a nuclease active Cas9 domain) or a nuclease inactive napDNAbp (e.g., a dCas9 domain or a Cas9n domain). Without wishing to be bound by any particular theory, the components of the writing plasmid (e.g., napDNAbp) are generally operably linked to a promoter sequence which controls the expression of each component (see, e.g., FIG. 1). In some embodiments, the components of the writing plasmid (e.g., napDNAbp) are operably linked to a single inducible promoter, such that the presence of the stimulus (e.g., a small molecule, a protein, a peptide, an amino acid, a metabolite, an inorganic molecule, an organometallic molecule, an organic molecule, a drug or drug candidate, a sugar, a lipid, a metal, a nucleic acid, a molecule produced during the activation of an endogenous or an exogenous signaling cascade, light, heat, sound, pressure, mechanical stress, shear stress, or a virus (e.g., phage) or other microorganism, etc.) induces expression of all the components of the writing plasmid simultaneously. In some embodiments, one or more of the components of the writing plasmid (e.g., napDNAbp) are operably linked to a constitutively active promoter, such that the component is constitutively expressed in cells. In some embodiments, each component of the writing plasmid (e.g., napDNAbp) is operably linked to a different inducible promoter, where expression of each component is only initiated in the presence of the correct set of stimuli (e.g., a small molecule, a protein, a peptide, an amino acid, a metabolite, an inorganic molecule, an organometallic molecule, an organic molecule, a drug or drug candidate, a sugar, a lipid, a metal, a nucleic acid, a molecule produced during the activation of an endogenous or an exogenous signaling cascade, light, heat, sound, pressure, mechanical stress, shear stress, or a virus (e.g., phage) or other microorganism, etc). The use of multiple different inducible promoters operably linked to separate components of the writing plasmid allows for the generation of cell data recorders that recapitulate an “AND” Boolean logic gate, where signal output (e.g., DNA double-strand breaks) is only recorded in the presence of all required stimuli, but not in the presence of only one stimulus (see, e.g., FIG. 2).

[0093] In one aspect, provided herein are writing plasmids comprising (i) a nucleic acid sequence encoding a nucleic acid programmable DNA binding protein (napDNAbp) operably linked to a promoter; and (ii) an origin of replication.

[0094] In some embodiments, the writing plasmid does not encode a sgRNA. In some embodiments, the napDNAbp encoded by the writing plasmid associates with a sgRNA expressed by a cell. In some embodiments, the napDNAbp associates with a sgRNA under conditions (e.g., a stimulus) that induce the expression of the napDNAbp, wherein the sgRNA is expressed by a cell. In some embodiments, the sgRNA is complementary to a target sequence.

[0095] In some embodiments, the promoter is appropriate for use in a prokaryotic system. In some embodiments, the promoter is appropriate for use in a bacterial (e.g., E. coli) system. In some embodiments, the promoter is induced by the presence of a stimulus. In some embodiments, the stimulus is a small molecule, a protein, a peptide, an amino acid, a metabolite, an inorganic molecule, an organometallic molecule, an organic molecule, a drug or drug candidate, a sugar, a lipid, a metal, a nucleic acid, a molecule produced during the activation of an endogenous or an exogenous signaling cascade, light, heat, sound, pressure, mechanical stress, shear stress, or a virus (e.g., phage) or other microorganism. In some embodiments, the stimulus is a phage. In some embodiments, the stimulus is light. In some embodiments, the stimulus is a small molecule. In some embodiments, the stimulus is a sugar. In some embodiments, the stimulus is an antibiotic. In some embodiments, the stimulus is anhydrotetracycline, IPTG, rhamnose, arabinose, tanespimycin, tunicamycin, or doxycycline. In some embodiments, the promoter is an inducible promoter. In some embodiments, the inducible promoter is an anhydrotetracycline-inducible promoter, IPTG-inducible promoter, rhamnose-inducible promoter, arabinose-inducible promoter, a tetracycline-inducible promoter, a light-inducible promoter, a heat-inducible promoter, or a phage shock promoter (PSP). In some embodiments, the inducible promoter is an anhydrotetracycline-inducible promoter. In some embodiments, the inducible promoter is selected from the inducible promoters shown in Table 7. In some embodiments, the promoter is a constitutive promoter. In some embodiments, the constitutive promoter is a constitutive Lac promoter. In some embodiments, the constitutive promoter is selected from the constitutive promoters shown in Table 7.

[0096] In some embodiments, the origin of replication (ORI) comprises a nucleic acid sequence suitable for use in a prokaryotic system. In some embodiments, the origin of replication (ORI) comprises a bacterial origin of replication sequence. In some embodiments, the origin of replication comprises a pSC101, pMB1, pBR322, ColE1, or p15A origin of replication sequence. In some embodiments, the origin of replication comprises a pSC101 origin of replication sequence. In some embodiments, the origin of replication sequence comprises an origin of replication sequence shown in Table 3.

[0097] In some embodiments, the napDNAbp is a RNA-programmable DNA binding protein. In some embodiments, the napDNAbp is a nuclease active napDNAbp capable of introducing a double-strand break. In some embodiments, the RNA-programmable DNA binding protein is a Cas9 domain, a Cpf1 domain, a CasX domain, a CasY domain, a C2c1 domain, a C2c2 domain, or a C2c3 domain. In some embodiments, the RNA-programmable DNA binding protein is a Cas9 domain. In some embodiments, the Cas9 domain is a nuclease inactive Cas9 (dCas9) domain, a Cas9 nickase (Cas9n) domain, or a nuclease active Cas9 domain. In some embodiments, the Cas9 domain is a nuclease active Cas9 domain. In some embodiments, the Cas9 domain is a Cas9 domain from Streptococcus pyogenes (spCas9). In some embodiments, the Cas9 domain comprises an amino acid sequence that is at least about 70% identical, at least about 80% identical, at least about 90%, at least about 95%, at least about 98%, at least about 99%, at least about 99.5%, or at least about 99.9% identical to the amino acid sequence provided in any one of SEQ ID NOs: 10-260. In some embodiments, the Cas9 domain comprises the amino acid sequence provided in any one of SEQ ID NOs: 10-260. In some embodiments, the Cas9 domain comprises the amino acid sequence of SEQ ID NO: 10. In some embodiments, the Cas9 domain consists of the amino acid sequence provided in any one of SEQ ID NOs: 10-260. In some embodiments, the Cas9 domain consists of the amino acid sequence of SEQ ID NO: 10.

[0098] In another aspect, provided herein are writing plasmids comprising (i) a nucleic acid sequence encoding (a) a nucleic acid programmable DNA binding protein (napDNAbp) and (b) a single guide RNA (sgRNA), wherein the nucleic acid sequence of (i) is operably linked to a promoter; and (ii) an origin of replication.

[0099] In some embodiments, the sgRNA associates with the napDNAbp under conditions (e.g., a stimulus or a set of stimuli) that induce the expression of the sgRNA and expression of the napDNAbp. In some embodiments, the sgRNA is complementary to a target sequence. In some embodiments, the writing plasmid does not encode a sgRNA. In some embodiments, the napDNAbp encoded by the writing plasmid associates with a sgRNA expressed by a cell. In some embodiments, the napDNAbp associates with a sgRNA under conditions (e.g., a stimulus) that induce the expression of the napDNAbp, wherein the sgRNA is expressed by a cell.

[0100] In some embodiments, the promoter is appropriate for use in a prokaryotic system. In some embodiments, the promoter is appropriate for use in a bacterial (e.g., E. coli) system. In some embodiments, the promoter is induced by the presence of a stimulus. In some embodiments, the stimulus is a small molecule, a protein, a peptide, an amino acid, a metabolite, an inorganic molecule, an organometallic molecule, an organic molecule, a drug or drug candidate, a sugar, a lipid, a metal, a nucleic acid, a molecule produced during the activation of an endogenous or an exogenous signaling cascade, light, heat, sound, pressure, mechanical stress, shear stress, or a virus (e.g., phage) or other microorganism. In some embodiments, the stimulus is a phage. In some embodiments, the stimulus is light. In some embodiments, the stimulus is a small molecule. In some embodiments, the stimulus is a sugar. In some embodiments, the stimulus is an antibiotic. In some embodiments, the stimulus is anhydrotetracycline, IPTG, rhamnose, arabinose, tanespimycin, tunicamycin, or doxycycline. In some embodiments, the promoter is an inducible promoter. In some embodiments, the inducible promoter is an anhydrotetracycline-inducible promoter, IPTG-inducible promoter, rhamnose-inducible promoter, arabinose-inducible promoter, a tetracycline-inducible promoter, a light-inducible promoter, a heat-inducible promoter, or a phage shock promoter (PSP). In some embodiments, the inducible promoter is an anhydrotetracycline-inducible promoter. In some embodiments, the inducible promoter is selected from the inducible promoters shown in Table 7. In some embodiments, the promoter is a constitutive promoter. In some embodiments, the constitutive promoter is a constitutive Lac promoter. In some embodiments, the constitutive promoter is selected from the constitutive promoters shown in Table 7.

[0101] In some embodiments, the origin of replication (ORI) comprises a nucleic acid sequence suitable for use in a prokaryotic system. In some embodiments, the origin of replication (ORI) comprises a bacterial origin of replication sequence. In some embodiments, the origin of replication comprises a pSC101, pMB1, pBR322, ColE1, or p15A origin of replication sequence. In some embodiments, the origin of replication comprises a pSC101 origin of replication sequence. In some embodiments, the origin of replication sequence comprises an origin of replication sequence shown in Table 3.

[0102] In some embodiments, the napDNAbp is a RNA-programmable DNA binding protein. In some embodiments, the napDNAbp is a nuclease active napDNAbp capable of introducing a double-strand break. In some embodiments, the RNA-programmable DNA binding protein is a Cas9 domain, a Cpf1 domain, a CasX domain, a CasY domain, a C2c1 domain, a C2c2 domain, or a C2c3 domain. In some embodiments, the RNA-programmable DNA binding protein is a Cas9 domain. In some embodiments, the Cas9 domain is a nuclease inactive Cas9 (dCas9) domain, a Cas9 nickase (Cas9n) domain, or a nuclease active Cas9 domain. In some embodiments, the Cas9 domain is a nuclease active Cas9 domain. In some embodiments, the Cas9 domain is a Cas9 domain from Streptococcus pyogenes (spCas9). In some embodiments, the Cas9 domain comprises an amino acid sequence that is at least about 70% identical, at least about 80% identical, at least about 90%, at least about 95%, at least about 98%, at least about 99%, at least about 99.5%, or at least about 99.9% identical to the amino acid sequence provided in any one of SEQ ID NOs: 10-260. In some embodiments, the Cas9 domain comprises the amino acid sequence provided in any one of SEQ ID NOs: 10-260. In some embodiments, the Cas9 domain comprises the amino acid sequence of SEQ ID NO: 10. In some embodiments, the Cas9 domain consists of the amino acid sequence provided in any one of SEQ ID NOs: 10-260. In some embodiments, the Cas9 domain consists of the amino acid sequence of SEQ ID NO: 10.

[0103] In yet another aspect, provided herein are writing plasmids comprising (i) a nucleic acid sequence encoding a nucleic acid programmable DNA binding protein (napDNAbp) operably linked to a first promoter; (ii) a nucleic acid sequence encoding a single guide RNA (sgRNA) operably linked to a second promoter; and (iii) an origin of replication.

[0104] In some embodiments, the sgRNA associates with the napDNAbp under conditions (e.g., a stimulus or set of stimuli) that induce the expression of the sgRNA and expression of the napDNAbp. In some embodiments, the sgRNA is complementary to a target sequence. In some embodiments, the writing plasmid does not encode a sgRNA. In some embodiments, the napDNAbp encoded by the writing plasmid associates with a sgRNA expressed by a cell. In some embodiments, the napDNAbp associates with a sgRNA under conditions (e.g., a stimulus) that induce the expression of the napDNAbp, wherein the sgRNA is expressed by a cell.

[0105] In some embodiments, at least one of the promoters is induced by the presence of a stimulus. In some embodiments, the stimulus is a small molecule, a protein, a peptide, an amino acid, a metabolite, a sugar, a lipid, a metal, a molecule produced during the activation of an endogenous or exogenous signaling cascade, light, heat, mechanical stress, or a virus (e.g., phage). In some embodiments, the stimulus is anhydrotetracycline, IPTG, rhamnose, arabinose, or doxycycline. In some embodiments, at least one of the promoters is an inducible promoter. In some embodiments, at least one of the promoters is a constitutive promoter. In some embodiments, the first promoter and the second promoter are different promoters. In some embodiments, the first promoter and the second promoter are different inducible promoters.

[0106] In some embodiments, the first promoter is appropriate for use in a prokaryotic system. In some embodiments, the first promoter is appropriate for use in a bacterial (e.g., E. coli) system. In some embodiments, the first promoter is induced by the presence of a stimulus. In some embodiments, the stimulus is a small molecule, a protein, a peptide, an amino acid, a metabolite, an inorganic molecule, an organometallic molecule, an organic molecule, a drug or drug candidate, a sugar, a lipid, a metal, a nucleic acid, a molecule produced during the activation of an endogenous or an exogenous signaling cascade, light, heat, sound, pressure, mechanical stress, shear stress, or a virus (e.g., phage) or other microorganism. In some embodiments, the stimulus is a phage. In some embodiments, the stimulus is light. In some embodiments, the stimulus is a small molecule. In some embodiments, the stimulus is a sugar. In some embodiments, the stimulus is an antibiotic. In some embodiments, the stimulus is anhydrotetracycline, IPTG, rhamnose, arabinose, tanespimycin, tunicamycin, or doxycycline. In some embodiments, the first promoter is an inducible promoter. In some embodiments, the inducible promoter is an anhydrotetracycline-inducible promoter, IPTG-inducible promoter, rhamnose-inducible promoter, arabinose-inducible promoter, a tetracycline-inducible promoter, a light-inducible promoter, a heat-inducible promoter, or a phage shock promoter (PSP). In some embodiments, the inducible promoter is an anhydrotetracycline-inducible promoter. In some embodiments, the inducible promoter is selected from the inducible promoters shown in Table 7. In some embodiments, the first promoter is a constitutive promoter. In some embodiments, the constitutive promoter is a constitutive Lac promoter. In some embodiments, the constitutive promoter is selected from the constitutive promoters shown in Table 7.

[0107] In some embodiments, the second promoter is appropriate for use in a prokaryotic system. In some embodiments, the second promoter is appropriate for use in a bacterial (e.g., E. coli) system. In some embodiments, the second promoter is induced by the presence of a stimulus. In some embodiments, the stimulus is a small molecule, a protein, a peptide, an amino acid, a metabolite, an inorganic molecule, an organometallic molecule, an organic molecule, a drug or drug candidate, a sugar, a lipid, a metal, a nucleic acid, a molecule produced during the activation of an endogenous or an exogenous signaling cascade, light, heat, sound, pressure, mechanical stress, shear stress, or a virus (e.g., phage) or other microorganism. In some embodiments, the stimulus is a phage. In some embodiments, the stimulus is light. In some embodiments, the stimulus is a small molecule. In some embodiments, the stimulus is a sugar. In some embodiments, the stimulus is an antibiotic. In some embodiments, the stimulus is anhydrotetracycline, IPTG, rhamnose, arabinose, tanespimycin, tunicamycin, or doxycycline. In some embodiments, the second promoter is an inducible promoter. In some embodiments, the inducible promoter is an anhydrotetracycline-inducible promoter, IPTG-inducible promoter, rhamnose-inducible promoter, arabinose-inducible promoter, a tetracycline-inducible promoter, a light-inducible promoter, a heat-inducible promoter, or a phage shock promoter (PSP). In some embodiments, the inducible promoter is an IPTG-inducible promoter. In some embodiments, the inducible promoter is an arabinose-inducible promoter. In some embodiments, the inducible promoter is a rhamnose-inducible promoter. In some embodiments, the inducible promoter is selected from the inducible promoters shown in Table 7. In some embodiments, the second promoter is a constitutive promoter. In some embodiments, the constitutive promoter is a constitutive Lac promoter. In some embodiments, the constitutive promoter is selected from the constitutive promoters shown in Table 7.

[0108] In some embodiments, the origin of replication (ORI) comprises a nucleic acid sequence suitable for use in a prokaryotic system. In some embodiments, the origin of replication (ORI) comprises a bacterial origin of replication sequence. In some embodiments, the origin of replication comprises a pSC101, pMB1, pBR322, ColE1, or p15A origin of replication sequence. In some embodiments, the origin of replication comprises a pSC101 origin of replication sequence. In some embodiments, the origin of replication sequence comprises an origin of replication sequence shown in Table 3.

[0109] In some embodiments, the napDNAbp is a RNA-programmable DNA binding protein. In some embodiments, the napDNAbp is a nuclease active napDNAbp capable of introducing a double-strand break. In some embodiments, the RNA-programmable DNA binding protein is a Cas9 domain, a Cpf1 domain, a CasX domain, a CasY domain, a C2c1 domain, a C2c2 domain, or a C2c3 domain. In some embodiments, the RNA-programmable DNA binding protein is a Cas9 domain. In some embodiments, the Cas9 domain is a nuclease inactive Cas9 (dCas9) domain, a Cas9 nickase (Cas9n) domain, or a nuclease active Cas9 domain. In some embodiments, the Cas9 domain is a nuclease active Cas9 domain. In some embodiments, the Cas9 domain is a Cas9 domain from Streptococcus pyogenes (spCas9). In some embodiments, the Cas9 domain comprises an amino acid sequence that is at least about 70% identical, at least about 80% identical, at least about 90%, at least about 95%, at least about 98%, at least about 99%, at least about 99.5%, or at least about 99.9% identical to the amino acid sequence provided in any one of SEQ ID NOs: 10-260. In some embodiments, the Cas9 domain comprises the amino acid sequence provided in any one of SEQ ID NOs: 10-260. In some embodiments, the Cas9 domain comprises the amino acid sequence of SEQ ID NO: 10. In some embodiments, the Cas9 domain consists of the amino acid sequence provided in any one of SEQ ID NOs: 10-260. In some embodiments, the Cas9 domain consists of the amino acid sequence of SEQ ID NO: 10.

[0110] In some embodiments, the writing plasmid comprises: (i) a nucleic acid sequence encoding a napDNAbp operably linked to an inducible promoter, (ii) a nucleic acid sequence encoding a sgRNA operably linked to a constitutive promoter, wherein the sgRNA is complementary to a target sequence, and (iii) an origin of replication. In some embodiments, the sgRNA is constitutively expressed. In some embodiments, the sgRNA associates with the napDNAbp under conditions (e.g., a stimulus) that induce the expression of the napDNAbp. In some embodiments, the inducible promoter is an anhydrotetracycline-inducible promoter. In some embodiments, the constitutive promoter is a constitutive Lac promoter.

[0111] In some embodiments, the writing plasmid comprises: (i) a nucleic acid sequence encoding a Cas9 domain operably linked to a constitutive promoter, (ii) a nucleic acid sequence encoding a sgRNA operably linked to an inducible promoter, wherein the sgRNA is complementary to a target sequence, and (iii) an origin of replication. In some embodiments, the sgRNA associates with the napDNAbp under conditions (e.g., a stimulus) that induce the expression of the sgRNA.

[0112] In some embodiments, the writing plasmid comprises: (i) a nucleic acid sequence encoding a napDNAbp operably linked to a first inducible promoter, (ii) a nucleic acid sequence encoding a sgRNA operably linked to a second inducible promoter, wherein the sgRNA is complementary to a target sequence, and (iii) an origin of replication. In some embodiments, the sgRNA associates with the napDNAbp under conditions (e.g., a stimulus) that induce the expression of the sgRNA and the expression of the napDNAbp. In some embodiments, the first inducible promoter is an anhydrotetracycline-inducible promoter. In some embodiments, the second inducible promoter is an IPTG-promoter.

[0113] In some embodiments, the napDNAbp is a RNA-programmable DNA binding protein. In some embodiments, the napDNAbp is a nuclease active napDNAbp capable of introducing a double-strand break. In some embodiments, the RNA-programmable DNA binding protein is a Cas9 domain, a Cpf1 domain, a CasX domain, a CasY domain, a C2c1 domain, a C2c2 domain, or a C2c3 domain. In some embodiments, the RNA-programmable DNA binding protein is a Cas9 domain. In some embodiments, the Cas9 domain is a nuclease inactive Cas9 (dCas9) domain, a Cas9 nickase (Cas9n) domain, or a nuclease active Cas9 domain. In some embodiments, the Cas9 domain is a nuclease active Cas9 domain. In some embodiments, the Cas9 domain is a Cas9 domain from Streptococcus pyogenes (spCas9). In some embodiments, the Cas9 domain comprises an amino acid sequence that is at least about 70% identical, at least about 80% identical, at least about 90%, at least about 95%, at least about 98%, at least about 99%, at least about 99.5%, or at least about 99.9% identical to the amino acid sequence provided in any one of SEQ ID NOs: 10-260. In some embodiments, the Cas9 domain comprises the amino acid sequence provided in any one of SEQ ID NOs: 10-260. In some embodiments, the Cas9 domain comprises the amino acid sequence of SEQ ID NO: 10. In some embodiments, the Cas9 domain consists of the amino acid sequence provided in any one of SEQ ID NOs: 10-260. In some embodiments, the Cas9 domain consists of the amino acid sequence of SEQ ID NO: 10.

[0114] In yet another aspect, provided herein are writing plasmids comprising: (i) a nucleic acid sequence encoding a nucleic acid programmable DNA binding protein (napDNAbp) operably linked to a first promoter; (ii) a nucleic acid sequence encoding a first single guide RNA (sgRNA) operably linked to a second promoter; (iii) a nucleic acid sequence encoding a second single guide RNA (sgRNA) operably linked to a third promoter; and (iii) an origin of replication.

[0115] In some embodiments, the first sgRNA associates with the napDNAbp under conditions (e.g., a stimulus or set of stimuli) that induce the expression of the first sgRNA and expression of the napDNAbp. In some embodiments, the first sgRNA is complementary to a target sequence. In some embodiments, the writing plasmid does not encode a first sgRNA. In some embodiments, the napDNAbp encoded by the writing plasmid associates with a first sgRNA expressed by a cell. In some embodiments, the napDNAbp associates with a first sgRNA under conditions (e.g., a stimulus) that induce the expression of the napDNAbp, wherein the first sgRNA is expressed by a cell. In some embodiments, the second sgRNA associates with the napDNAbp under conditions (e.g., a stimulus or set of stimuli) that induce the expression of the second sgRNA and expression of the napDNAbp. In some embodiments, the second sgRNA is complementary to a target sequence. In some embodiments, the first and the second sgRNA are not complementary to the same target sequence. In some embodiments, the writing plasmid does not encode a second sgRNA. In some embodiments, the napDNAbp encoded by the writing plasmid associates with a second sgRNA expressed by a cell. In some embodiments, the napDNAbp associates with a second sgRNA under conditions (e.g., a stimulus) that induce the expression of the napDNAbp, wherein the second sgRNA is expressed by a cell.

[0116] In some embodiments, at least one of the promoters is induced by the presence of a stimulus. In some embodiments, the stimulus is a small molecule, a protein, a peptide, an amino acid, a metabolite, an inorganic molecule, an organometallic molecule, an organic molecule, a drug or drug candidate, a sugar, a lipid, a metal, a nucleic acid, a molecule produced during the activation of an endogenous or an exogenous signaling cascade, light, heat, sound, pressure, mechanical stress, shear stress, or a virus (e.g., phage) or other microorganism. In some embodiments, the stimulus is a phage. In some embodiments, the stimulus is light. In some embodiments, the stimulus is a small molecule. In some embodiments, the stimulus is a sugar. In some embodiments, the stimulus is an antibiotic. In some embodiments, the stimulus is anhydrotetracycline, IPTG, rhamnose, arabinose, tanespimycin, tunicamycin, or doxycycline. In some embodiments, at least one of the promoters is an inducible promoter. In some embodiments, at least one of the promoters is a constitutive promoter. In some embodiments, the first promoter, the second promoter, and the third promoter are different promoters. In some embodiments, the first promoter, the second promoter, and the third promoter are different inducible promoters.

[0117] In some embodiments, the first promoter is appropriate for use in a prokaryotic system. In some embodiments, the first promoter is appropriate for use in a bacterial (e.g., E. coli) system. In some embodiments, the first promoter is induced by the presence of a stimulus. In some embodiments, the stimulus is a small molecule, a protein, a peptide, an amino acid, a metabolite, a sugar, a molecule produced during the activation of an endogenous or exogenous signaling cascade, light, heat, mechanical stress, or a virus (e.g., phage). In some embodiments, the stimulus is anhydrotetracycline, IPTG, rhamnose, arabinose, tanespimycin, tunicamycin, or doxycycline. In some embodiments, the first promoter is an inducible promoter. In some embodiments, the inducible promoter is an anhydrotetracycline-inducible promoter, IPTG-inducible promoter, rhamnose-inducible promoter, arabinose-inducible promoter, a tetracycline-inducible promoter, a light-inducible promoter, a heat-inducible promoter, or a phage shock promoter (PSP). In some embodiments, the inducible promoter is an anhydrotetracycline-inducible promoter. In some embodiments, the inducible promoter is selected from the inducible promoters shown in Table 7. In some embodiments, the first promoter is a constitutive promoter. In some embodiments, the constitutive promoter is a constitutive Lac promoter. In some embodiments, the constitutive promoter is selected from the constitutive promoters shown in Table 7.

[0118] In some embodiments, the second promoter is appropriate for use in a prokaryotic system. In some embodiments, the second promoter is appropriate for use in a bacterial (e.g., E. coli) system. In some embodiments, the second promoter is induced by the presence of a stimulus. In some embodiments, the stimulus is a small molecule, a protein, a peptide, an amino acid, a metabolite, an inorganic molecule, an organometallic molecule, an organic molecule, a drug or drug candidate, a sugar, a lipid, a metal, a nucleic acid, a molecule produced during the activation of an endogenous or an exogenous signaling cascade, light, heat, sound, pressure, mechanical stress, shear stress, or a virus (e.g., phage) or other microorganism. In some embodiments, the stimulus is a phage. In some embodiments, the stimulus is light. In some embodiments, the stimulus is a small molecule. In some embodiments, the stimulus is a sugar. In some embodiments, the stimulus is an antibiotic. In some embodiments, the stimulus is anhydrotetracycline, IPTG, rhamnose, arabinose, tanespimycin, tunicamycin, or doxycycline. In some embodiments, the second promoter is an inducible promoter. In some embodiments, the inducible promoter is an anhydrotetracycline-inducible promoter, IPTG-inducible promoter, rhamnose-inducible promoter, arabinose-inducible promoter, a tetracycline-inducible promoter, a light-inducible promoter, a heat-inducible promoter, or a phage shock promoter (PSP). In some embodiments, the inducible promoter is an IPTG-inducible promoter. In some embodiments, the inducible promoter is an arabinose-inducible promoter. In some embodiments, the inducible promoter is a rhamnose-inducible promoter. In some embodiments, the inducible promoter is selected from the inducible promoters shown in Table 7. In some embodiments, the second promoter is a constitutive promoter. In some embodiments, the constitutive promoter is a constitutive Lac promoter. In some embodiments, the constitutive promoter is selected from the constitutive promoters shown in Table 7.

[0119] In some embodiments, the third promoter is appropriate for use in a prokaryotic system. In some embodiments, the third promoter is appropriate for use in a bacterial (e.g., E. coli) system. In some embodiments, the third promoter is induced by the presence of a stimulus. In some embodiments, the stimulus is a small molecule, a protein, a peptide, an amino acid, a metabolite, an inorganic molecule, an organometallic molecule, an organic molecule, a drug or drug candidate, a sugar, a lipid, a metal, a nucleic acid, a molecule produced during the activation of an endogenous or an exogenous signaling cascade, light, heat, sound, pressure, mechanical stress, shear stress, or a virus (e.g., phage) or other microorganism. In some embodiments, the stimulus is a phage. In some embodiments, the stimulus is light. In some embodiments, the stimulus is a small molecule. In some embodiments, the stimulus is a sugar. In some embodiments, the stimulus is an antibiotic. In some embodiments, the stimulus is anhydrotetracycline, IPTG, rhamnose, arabinose, tanespimycin, tunicamycin, or doxycycline. In some embodiments, the third promoter is an inducible promoter. In some embodiments, the inducible promoter is an anhydrotetracycline-inducible promoter, IPTG-inducible promoter, rhamnose-inducible promoter, arabinose-inducible promoter, a tetracycline-inducible promoter, a light-inducible promoter, a heat-inducible promoter, or a phage shock promoter (PSP). In some embodiments, the inducible promoter is an IPTG-inducible promoter. In some embodiments, the inducible promoter is an arabinose-inducible promoter. In some embodiments, the inducible promoter is a rhamnose-inducible promoter. In some embodiments, the inducible promoter is selected from the inducible promoters shown in Table 7. In some embodiments, the third promoter is a constitutive promoter. In some embodiments, the constitutive promoter is a constitutive Lac promoter. In some embodiments, the constitutive promoter is selected from the constitutive promoters shown in Table 7.

[0120] In some embodiments, the origin of replication (ORI) comprises a nucleic acid sequence suitable for use in a prokaryotic system. In some embodiments, the origin of replication (ORI) comprises a bacterial origin of replication sequence. In some embodiments, the origin of replication comprises a pSC101, pMB1, pBR322, ColE1, or p15A origin of replication sequence. In some embodiments, the origin of replication comprises a pSC101 origin of replication sequence. In some embodiments, the origin of replication sequence comprises an origin of replication sequence shown in Table 3.

[0121] In some embodiments, the writing plasmid comprises: (i) a nucleic acid sequence encoding a napDNAbp operably linked to a first inducible promoter, (ii) a nucleic acid sequence encoding a first sgRNA operably linked to a second inducible promoter, wherein the first sgRNA is complementary to a target sequence, (iii) a nucleic acid sequence encoding a second sgRNA operably linked to a third inducible promoter, wherein the second sgRNA is complementary to a target sequence, and (iv) an origin of replication. In some embodiments, the first sgRNA associates with the napDNAbp only under conditions (e.g., a stimulus or set of stimuli) that induce the expression of the first sgRNA and expression of the napDNAbp. In some embodiments, the second sgRNA associates with the napDNAbp only under conditions (e.g., a stimulus or set of stimuli) that induce the expression of the second sgRNA and expression of the napDNAbp. In some embodiments, the first inducible promoter is an anhydrotetracycline-inducible promoter. In some embodiments, the second inducible promoter is an IPTG-inducible promoter. In some embodiments, the third inducible promoter is a rhamnose-inducible promoter.

[0122] In some embodiments, the napDNAbp is a RNA-programmable DNA binding protein. In some embodiments, the napDNAbp is a nuclease active napDNAbp capable of introducing a double-strand break. In some embodiments, the RNA-programmable DNA binding protein is a Cas9 domain, a Cpf1 domain, a CasX domain, a CasY domain, a C2c1 domain, a C2c2 domain, or a C2c3 domain. In some embodiments, the RNA-programmable DNA binding protein is a Cas9 domain. In some embodiments, the Cas9 domain is a nuclease inactive Cas9 (dCas9) domain, a Cas9 nickase (Cas9n) domain, or a nuclease active Cas9 domain. In some embodiments, the Cas9 domain is a nuclease active Cas9 domain. In some embodiments, the Cas9 domain is a Cas9 domain from Streptococcus pyogenes (spCas9). In some embodiments, the Cas9 domain comprises an amino acid sequence that is at least about 70% identical, at least about 80% identical, at least about 90%, at least about 95%, at least about 98%, at least about 99%, at least about 99.5%, or at least about 99.9% identical to the amino acid sequence provided in any one of SEQ ID NOs: 10-260. In some embodiments, the Cas9 domain comprises the amino acid sequence provided in any one of SEQ ID NOs: 10-260. In some embodiments, the Cas9 domain comprises the amino acid sequence of SEQ ID NO: 10. In some embodiments, the Cas9 domain consists of the amino acid sequence provided in any one of SEQ ID NOs: 10-260. In some embodiments, the Cas9 domain consists of the amino acid sequence of SEQ ID NO: 10.

[0123] In some embodiments, any of the writing plasmids described above may be used in a prokaryotic cell. In some embodiments, any of the writing plasmids described above may be used in a bacterial cell. In some embodiments, the bacterial cell is an E. coli cell.

[0124] One of ordinary skill in the art will recognize based on this disclosure and knowledge in the field that additional promoters operably linked to additional sgRNA sequences, or additional napDNAbps (e.g., an orthogonal Cas9 domain) operably linked to additional promoters, can be included in each of the writing plasmids for use in a prokaryotic system (e.g., a prokaryotic cell) described above, and thus the disclosure in not limited in that regard. In some embodiments, the prokaryotic system is a bacterial system (e.g., a bacterial cell). In some embodiments, the bacterial system is an E. coli system (e.g., an E coli cell).

[0125] Some aspects of the present disclosure provide writing plasmids comprising a nucleic acid sequence encoding fusion protein comprising a nucleic acid programmable DNA binding protein (napDNAbp) and a nucleic acid editing domain operably linked to a promoter. In some embodiments, the napDNAbp is a nuclease inactive napDNAbp that does not introduce a single-strand or double-strand break. Without wishing to be bound by any particular theory, the components of the writing plasmid (e.g., fusion protein) are generally operably linked to a promoter sequence which controls the expression of each component (see, e.g., FIG. 3). In some embodiments, the components of the writing plasmid (e.g., fusion protein, sgRNA) are operably linked to a single inducible promoter, such that the presence of the stimulus (e.g., small molecule, antibiotic, metabolite, protein, peptide, heat, light, etc.) induces expression of all the components of the writing plasmid simultaneously. In some embodiments, one or more of the components of the writing plasmid (e.g., fusion protein, sgRNA) are operably linked to a constitutively active promoter, such that the component is constitutively expressed in cells. In some embodiments, each component of the writing plasmid (e.g., fusion protein, sgRNA) is operably linked to a different inducible promoter, where expression of each component is only initiated in the presence of the correct set of stimuli (e.g., small molecule, antibiotic, metabolite, sugar, protein, peptide, amino acid, molecule produced during an activated endogenous or exogenous signaling cascade, light, heat, virus, etc). The use of multiple different inducible promoters operably linked to separate components of the writing plasmid allows for the generation of cell data recorders that recapitulate an “AND” Boolean logic gate, where signal output (e.g., DNA double-strand breaks) is only recorded in the presence of all required stimuli, but not in the presence of only one stimulus (see, e.g., FIG. 4). These writing plasmids may be used in both prokaryotic (e.g., bacterial, e.g., E. coli) and eukaryotic (e.g., mammalian, e.g., human) systems, with the necessary attention to selecting appropriate promoters and ORI sequences for the desired system application.

[0126] Thus, in one aspect, provided herein are writing plasmids for use in prokaryotic cells comprising (i) a nucleic acid sequence encoding a fusion protein comprising a nucleic acid programmable DNA binding protein (napDNAbp) and a nucleic acid editing domain operably linked to a promoter; and (ii) an origin of replication.

[0127] In some embodiments, the writing plasmid does not encode a sgRNA. In some embodiments, the napDNAbp of the fusion protein encoded by the writing plasmid associates with a sgRNA expressed by a cell. In some embodiments, the napDNAbp of the fusion protein associates with a sgRNA under conditions (e.g., a stimulus) that induce the expression of the fusion protein, wherein the sgRNA is expressed by a cell. In some embodiments, the sgRNA is complementary to a target sequence.

[0128] In some embodiments, the promoter is appropriate for use in a prokaryotic system. In some embodiments, the promoter is appropriate for use in a bacterial (e.g., E. coli) system. In some embodiments, the promoter is induced by the presence of a stimulus. In some embodiments, the stimulus is a small molecule, a protein, a peptide, an amino acid, a metabolite, an inorganic molecule, an organometallic molecule, an organic molecule, a drug or drug candidate, a sugar, a lipid, a metal, a nucleic acid, a molecule produced during the activation of an endogenous or an exogenous signaling cascade, light, heat, sound, pressure, mechanical stress, shear stress, or a virus (e.g., phage) or other microorganism. In some embodiments, the stimulus is a phage. In some embodiments, the stimulus is light. In some embodiments, the stimulus is a small molecule. In some embodiments, the stimulus is a sugar. In some embodiments, the stimulus is an antibiotic. In some embodiments, the stimulus is anhydrotetracycline, IPTG, rhamnose, arabinose, tanespimycin, tunicamycin, or doxycycline. In some embodiments, the promoter is an inducible promoter. In some embodiments, the inducible promoter is an anhydrotetracycline-inducible promoter, IPTG-inducible promoter, rhamnose-inducible promoter, arabinose-inducible promoter, a tetracycline-inducible promoter, a light-inducible promoter, a heat-inducible promoter, or a phage shock promoter (PSP). In some embodiments, the inducible promoter is an anhydrotetracycline-inducible promoter. In some embodiments, the inducible promoter is selected from the inducible promoters shown in Table 7. In some embodiments, the promoter is a constitutive promoter. In some embodiments, the constitutive promoter is a constitutive Lac promoter. In some embodiments, the constitutive promoter is selected from the constitutive promoters shown in Table 7.

[0129] In some embodiments, the origin of replication (ORI) comprises a nucleic acid sequence suitable for use in a prokaryotic system. In some embodiments, the origin of replication (ORI) comprises a bacterial origin of replication sequence. In some embodiments, the origin of replication comprises a CloDF13, CloE1, pSC101, pMB1, pBR322, ColE1, or p15A origin of replication sequence. In some embodiments, the origin of replication comprises a pSC101 origin of replication sequence. In some embodiments, the origin of replication comprises a CloDF13 origin of replication sequence. In some embodiments, the origin of replication comprises a CloE1 origin of replication sequence. In some embodiments, the origin of replication sequence comprises an origin of replication sequence shown in Table 3.

[0130] In some embodiments, the napDNAbp is a nuclease inactive napDNAbp that does not introduce a single-strand or double-strand break. In some embodiments, the napDNAbp is a RNA-programmable DNA binding protein. In some embodiments, the RNA-programmable DNA binding protein comprises a Cas9 domain, a Cpf1 domain, a CasX domain, a CasY domain, a C2c1 domain, a C2c2 domain, or a C2c3 domain. In some embodiments, the RNA-programmable DNA binding protein comprises a Cas9 domain. In some embodiments, the Cas9 domain is a nuclease inactive Cas9 (dCas9) domain, a Cas9 nickase (Cas9n) domain, or a nuclease active Cas9 domain. In some embodiments, the Cas9 domain is a nuclease inactive dCas9 domain. In some embodiments, the Cas9 domain is a Cas9 nickase (Cas9n) domain. In some embodiments, the Cas9 domain is a Cas9 domain from Streptococcus pyogenes (spCas9). In some embodiments, the Cas9 domain comprises an amino acid sequence that is at least about 70% identical, at least about 80% identical, at least about 90%, at least about 95%, at least about 98%, at least about 99%, at least about 99.5%, or at least about 99.9% identical to the amino acid sequence provided in any one of SEQ ID NOs: 10-260. In some embodiments, the Cas9 domain is a dCas9 domain that comprises a D10A and a H840A mutation in the amino acid sequence provided by SEQ ID NO: 10, or a corresponding mutation in any one of SEQ ID NOs: 11-260. In some embodiments, the dCas9 domain comprises the amino acid sequence of SEQ ID NO: 6. In some embodiments, the Cas9 domain is a Cas9n domain that comprises a D10A or a H840A mutation in the amino acid sequence provided by SEQ ID NO: 10, or a corresponding mutation in any one of SEQ ID NOs: 11-260. In some embodiments, the Cas9 domain is a Cas9n domain that comprises a D10A mutation in the amino acid sequence provided by SEQ ID NO: 10, or a corresponding mutation in any one of SEQ ID NOs: 11-260. In some embodiments, the Cas9 domain comprises the amino acid sequence of SEQ ID NO: 7.

[0131] In some embodiments, the nucleic acid editing domain comprises a deaminase, a nuclease, a nickase, a recombinase, a methyltransferase, a methylase, an acetylase, an acetyltransferase, a transcriptional activator, or a transcriptional repressor domain. In some embodiments, the nucleic acid editing domain comprises a deaminase domain. In some embodiments, the deaminase domain is selected from any of the deaminase domains provided herein. In some embodiments, the deaminase domain is a cytidine deaminase domain. In some embodiments, the cytidine deaminase domain comprises the amino acid sequence of any one of SEQ ID NOs: 350-389. In some embodiments, the cytidine deaminase domain is a deaminase domain from the apoplipoprotein B mRNA-editing complex (APOBEC) family. In some embodiments, the APOBEC family deaminase is selected from the group consisting of APOBEC1 deaminase, APOBEC2 deaminase, APOBEC3A deaminase, APOBEC3B deaminase, APOBEC3C deaminase, APOBEC3D deaminase, APOBEC3F deaminase, APOBEC3G deaminase, and APOBEC3H deaminase.

[0132] In some embodiments, the fusion protein comprises any of the fusion proteins provided herein. In some embodiments, the fusion protein comprises a Cas9 domain and a cytidine deaminase domain. In some embodiments, the Cas9 domain and the cytidine deaminase are linked via a linker. In some embodiments, the linker comprises the amino acid sequence of any one of SEQ ID NOs: 300-318. In some embodiments, the linker comprises the amino acid sequence SGSETPGTSESATPES (SEQ ID NO: 306). In some embodiments, the fusion protein comprises the amino acid sequence of any one of SEQ ID NOs: 540-542. In some embodiments, the fusion protein further comprises a uracil glycosylase inhibitor (UGI) domain. In some embodiments, the fusion protein comprises the amino acid sequence of any one of SEQ ID NOs: 543-550. In some embodiments, the fusion protein comprises the amino acid sequence of SEQ ID NO: 543. In some embodiments, the fusion protein comprises the amino acid sequence of SEQ ID NO: 544. In some embodiments, the fusion protein comprises a Cas9 domain and one or more adenosine deaminase domains. In some embodiments, one or more of the adenosine deaminase domains comprise the amino acid sequence of any one of SEQ ID NOs: 400-458. In some embodiments, the Cas9 domain and the adenosine deaminase are linked via a linker. In some embodiments, the linker comprises the amino acid sequence of any one of SEQ ID NOs: 300-318. In some embodiments, the fusion protein comprises the amino acid sequence of any one of SEQ ID NOs: 560-586. In some embodiments, the fusion protein further comprises a uracil glycosylase inhibitor (UGI) domain or a dISN domain.

[0133] In another aspect, provided herein are writing plasmids for use in prokayotic cells comprising (i) a nucleic acid sequence encoding (a) a fusion protein comprising a nucleic acid programmable DNA binding protein (napDNAbp) and a nucleic acid editing domain and (b) a single guide RNA (sgRNA), wherein the nucleic acid sequence of (i) is operably linked to a promoter; and (ii) an origin of replication.

[0134] In some embodiments, the sgRNA associates with the napDNAbp under conditions (e.g., a stimulus or set of stimuli) that induce the expression of the sgRNA and expression of the fusion protein. In some embodiments, the sgRNA is complementary to a target sequence. In some embodiments, the writing plasmid does not encode a sgRNA. In some embodiments, the napDNAbp of the fusion protein encoded by the writing plasmid associates with a sgRNA expressed by a cell. In some embodiments, the napDNAbp associates with a sgRNA under conditions (e.g., a stimulus) that induce the expression of the fusion protein, wherein the sgRNA is expressed by a cell.

[0135] In some embodiments, the promoter is appropriate for use in a prokaryotic system. In some embodiments, the promoter is appropriate for use in a bacterial (e.g., E. coli) system. In some embodiments, the promoter is induced by the presence of a stimulus. In some embodiments, the stimulus is a small molecule, a protein, a peptide, an amino acid, a metabolite, an inorganic molecule, an organometallic molecule, an organic molecule, a drug or drug candidate, a sugar, a lipid, a metal, a nucleic acid, a molecule produced during the activation of an endogenous or an exogenous signaling cascade, light, heat, sound, pressure, mechanical stress, shear stress, or a virus (e.g., phage) or other microorganism. In some embodiments, the stimulus is a phage. In some embodiments, the stimulus is light. In some embodiments, the stimulus is a small molecule. In some embodiments, the stimulus is a sugar. In some embodiments, the stimulus is an antibiotic. In some embodiments, the stimulus is anhydrotetracycline, IPTG, rhamnose, arabinose, tanespimycin, tunicamycin, or doxycycline. In some embodiments, the promoter is an inducible promoter. In some embodiments, the inducible promoter is an anhydrotetracycline-inducible promoter, IPTG-inducible promoter, rhamnose-inducible promoter, arabinose-inducible promoter, a tetracycline-inducible promoter, a light-inducible promoter, a heat-inducible promoter, or a phage shock promoter (PSP). In some embodiments, the inducible promoter is an anhydrotetracycline-inducible promoter. In some embodiments, the inducible promoter is selected from the inducible promoters shown in Table 7. In some embodiments, the promoter is a constitutive promoter. In some embodiments, the constitutive promoter is a constitutive Lac promoter. In some embodiments, the constitutive promoter is selected from the constitutive promoters shown in Table 7.

[0136] In some embodiments, the origin of replication (ORI) comprises a nucleic acid sequence suitable for use in a prokaryotic system. In some embodiments, the origin of replication (ORI) comprises a bacterial origin of replication sequence. In some embodiments, the origin of replication comprises a CloDF13, CloE1, pSC101, pMB1, pBR322, ColE1, or p15A origin of replication sequence. In some embodiments, the origin of replication comprises a pSC101 origin of replication sequence. In some embodiments, the origin of replication comprises a CloDF13 origin of replication sequence. In some embodiments, the origin of replication comprises a CloE1 origin of replication sequence. In some embodiments, the origin of replication sequence comprises an origin of replication sequence shown in Table 3.

[0137] In some embodiments, the napDNAbp is a nuclease inactive napDNAbp that does not introduce a single-strand or double-strand break. In some embodiments, the napDNAbp is a RNA-programmable DNA binding protein. In some embodiments, the RNA-programmable DNA binding protein comprises a Cas9 domain, a Cpf1 domain, a CasX domain, a CasY domain, a C2c1 domain, a C2c2 domain, or a C2c3 domain. In some embodiments, the RNA-programmable DNA binding protein comprises a Cas9 domain. In some embodiments, the Cas9 domain is a nuclease inactive Cas9 (dCas9) domain, a Cas9 nickase (Cas9n) domain, or a nuclease active Cas9 domain. In some embodiments, the Cas9 domain is a nuclease inactive dCas9 domain. In some embodiments, the Cas9 domain is a Cas9 nickase (Cas9n) domain. In some embodiments, the Cas9 domain is a Cas9 domain from Streptococcus pyogenes (spCas9). In some embodiments, the Cas9 domain comprises an amino acid sequence that is at least about 70% identical, at least about 80% identical, at least about 90%, at least about 95%, at least about 98%, at least about 99%, at least about 99.5%, or at least about 99.9% identical to the amino acid sequence provided in any one of SEQ ID NOs: 10-260. In some embodiments, the Cas9 domain is a dCas9 domain that comprises a D10A and a H840A mutation in the amino acid sequence provided by SEQ ID NO: 10, or a corresponding mutation in any one of SEQ ID NOs: 11-260. In some embodiments, the dCas9 domain comprises the amino acid sequence of SEQ ID NO: 6. In some embodiments, the Cas9 domain is a Cas9n domain that comprises a D10A or a H840A mutation in the amino acid sequence provided by SEQ ID NO: 10, or a corresponding mutation in any one of SEQ ID NOs: 11-260. In some embodiments, the Cas9 domain is a Cas9n domain that comprises a D10A mutation in the amino acid sequence provided by SEQ ID NO: 10, or a corresponding mutation in any one of SEQ ID NOs: 11-260. In some embodiments, the Cas9 domain comprises the amino acid sequence of SEQ ID NO: 7.

[0138] In some embodiments, the nucleic acid editing domain comprises a deaminase, a nuclease, a nickase, a recombinase, a methyltransferase, a methylase, an acetylase, an acetyltransferase, a transcriptional activator, or a transcriptional repressor domain. In some embodiments, the nucleic acid editing domain comprises a deaminase domain. In some embodiments, the deaminase domain is selected from any of the deaminase domains provided herein. In some embodiments, the deaminase domain is a cytidine deaminase domain. In some embodiments, the cytidine deaminase domain comprises the amino acid sequence of any one of SEQ ID NOs: 350-389. In some embodiments, the cytidine deaminase domain is a deaminase domain from the apoplipoprotein B mRNA-editing complex (APOBEC) family. In some embodiments, the APOBEC family deaminase is selected from the group consisting of APOBEC1 deaminase, APOBEC2 deaminase, APOBEC3A deaminase, APOBEC3B deaminase, APOBEC3C deaminase, APOBEC3D deaminase, APOBEC3F deaminase, APOBEC3G deaminase, and APOBEC3H deaminase.

[0139] In some embodiments, the fusion protein comprises any of the fusion proteins described herein. In some embodiments, the fusion protein comprises a Cas9 domain and a cytidine deaminase domain. In some embodiments, the Cas9 domain and the cytidine deaminase are linked via a linker. In some embodiments, the linker comprises the amino acid sequence of any one of SEQ ID NOs: 300-318. In some embodiments, the linker comprises the amino acid sequence SGSETPGTSESATPES (SEQ ID NO: 306). In some embodiments, the fusion protein comprises the amino acid sequence of any one of SEQ ID NOs: 540-542. In some embodiments, the fusion protein further comprises a uracil glycosylase inhibitor (UGI) domain. In some embodiments, the fusion protein comprises the amino acid sequence of any one of SEQ ID NOs: 543-550. In some embodiments, the fusion protein comprises the amino acid sequence of SEQ ID NO: 543. In some embodiments, the fusion protein comprises the amino acid sequence of SEQ ID NO: 544. In some embodiments, the fusion protein comprises a Cas9 domain and one or more adenosine deaminase domains. In some embodiments, one or more of the adenosine deaminase domains comprise the amino acid sequence of any one of SEQ ID NOs: 400-458. In some embodiments, the Cas9 domain and the adenosine deaminase are linked via a linker. In some embodiments, the linker comprises the amino acid sequence of any one of SEQ ID NOs: 300-318. In some embodiments, the fusion protein comprises the amino acid sequence of any one of SEQ ID NOs: 560-586. In some embodiments, the fusion protein further comprises a uracil glycosylase inhibitor (UGI) domain or a dISN domain.

[0140] In yet another aspect, provided herein are writing plasmids for use in prokaryotic cells comprising (i) a nucleic acid sequence encoding a fusion protein comprising a nucleic acid programmable DNA binding protein (napDNAbp) and a nucleic acid editing domain operably linked to a first promoter; (ii) a nucleic acid sequence encoding a single guide RNA (sgRNA) operably linked to a second promoter; and (iii) an origin of replication.

[0141] In some embodiments, the sgRNA associates with the napDNAbp under conditions (e.g., a stimulus or set of stimuli) that induce the expression of the sgRNA and expression of the fusion protein. In some embodiments, the sgRNA is complementary to a target sequence. In some embodiments, the writing plasmid does not encode a sgRNA. In some embodiments, the napDNAbp encoded by the writing plasmid associates with a sgRNA expressed by a cell. In some embodiments, the napDNAbp associates with a sgRNA under conditions (e.g., a stimulus) that induce the expression of the fusion protein, wherein the sgRNA is expressed by a cell.

[0142] In some embodiments, at least one of the promoters is induced by the presence of a stimulus. In some embodiments, the stimulus is a small molecule, a protein, a peptide, an amino acid, a metabolite, an inorganic molecule, an organometallic molecule, an organic molecule, a drug or drug candidate, a sugar, a lipid, a metal, a nucleic acid, a molecule produced during the activation of an endogenous or an exogenous signaling cascade, light, heat, sound, pressure, mechanical stress, shear stress, or a virus (e.g., phage) or other microorganism. In some embodiments, the stimulus is a phage. In some embodiments, the stimulus is light. In some embodiments, the stimulus is a small molecule. In some embodiments, the stimulus is a sugar. In some embodiments, the stimulus is an antibiotic. In some embodiments, the stimulus is anhydrotetracycline, IPTG, rhamnose, arabinose, tanespimycin, tunicamycin, or doxycycline. In some embodiments, at least one of the promoters is an inducible promoter. In some embodiments, at least one of the promoters is a constitutive promoter. In some embodiments, the first promoter and the second promoter are different promoters. In some embodiments, the first promoter and the second promoter are different inducible promoters.

[0143] In some embodiments, the first promoter is appropriate for use in a prokaryotic system. In some embodiments, the first promoter is appropriate for use in a bacterial (e.g., E. coli) system. In some embodiments, the first promoter is induced by the presence of a stimulus. In some embodiments, the stimulus is a small molecule, a protein, a peptide, an amino acid, a metabolite, an inorganic molecule, an organometallic molecule, an organic molecule, a drug or drug candidate, a sugar, a lipid, a metal, a nucleic acid, a molecule produced during the activation of an endogenous or an exogenous signaling cascade, light, heat, sound, pressure, mechanical stress, shear stress, or a virus (e.g., phage) or other microorganism. In some embodiments, the stimulus is a phage. In some embodiments, the stimulus is light. In some embodiments, the stimulus is a small molecule. In some embodiments, the stimulus is a sugar. In some embodiments, the stimulus is an antibiotic. In some embodiments, the stimulus is anhydrotetracycline, IPTG, rhamnose, arabinose, tanespimycin, tunicamycin, or doxycycline. In some embodiments, the first promoter is an inducible promoter. In some embodiments, the inducible promoter is an anhydrotetracycline-inducible promoter, IPTG-inducible promoter, rhamnose-inducible promoter, arabinose-inducible promoter, a tetracycline-inducible promoter, a light-inducible promoter, a heat-inducible promoter, or a phage shock promoter (PSP). In some embodiments, the inducible promoter is an anhydrotetracycline-inducible promoter. In some embodiments, the inducible promoter is selected from the inducible promoters shown in Table 7. In some embodiments, the first promoter is a constitutive promoter. In some embodiments, the constitutive promoter is a constitutive Lac promoter. In some embodiments, the constitutive promoter is selected from the constitutive promoters shown in Table 7.

[0144] In some embodiments, the second promoter is appropriate for use in a prokaryotic system. In some embodiments, the second promoter is appropriate for use in a bacterial (e.g., E. coli) system. In some embodiments, the second promoter is induced by the presence of a stimulus. In some embodiments, the stimulus is a small molecule, a protein, a peptide, an amino acid, a metabolite, an inorganic molecule, an organometallic molecule, an organic molecule, a drug or drug candidate, a sugar, a lipid, a metal, a nucleic acid, a molecule produced during the activation of an endogenous or an exogenous signaling cascade, light, heat, sound, pressure, mechanical stress, shear stress, or a virus (e.g., phage) or other microorganism. In some embodiments, the stimulus is a phage. In some embodiments, the stimulus is light. In some embodiments, the stimulus is a small molecule. In some embodiments, the stimulus is a sugar. In some embodiments, the stimulus is an antibiotic. In some embodiments, the stimulus is anhydrotetracycline, IPTG, rhamnose, arabinose, tanespimycin, tunicamycin, or doxycycline. In some embodiments, the second promoter is an inducible promoter. In some embodiments, the inducible promoter is an anhydrotetracycline-inducible promoter, IPTG-inducible promoter, rhamnose-inducible promoter, arabinose-inducible promoter, a tetracycline-inducible promoter, a light-inducible promoter, a heat-inducible promoter, or a phage shock promoter (PSP). In some embodiments, the inducible promoter is an IPTG-inducible promoter. In some embodiments, the inducible promoter is an arabinose-inducible promoter. In some embodiments, the inducible promoter is a rhamnose-inducible promoter. In some embodiments, the inducible promoter is selected from the inducible promoters shown in Table 7. In some embodiments, the second promoter is a constitutive promoter. In some embodiments, the constitutive promoter is a constitutive Lac promoter. In some embodiments, the constitutive promoter is selected from the constitutive promoters shown in Table 7.

[0145] In some embodiments, the origin of replication (ORI) comprises a nucleic acid sequence suitable for use in a prokaryotic system. In some embodiments, the origin of replication (ORI) comprises a bacterial origin of replication sequence. In some embodiments, the origin of replication comprises a CloDF13, CloE1, pSC101, pMB1, pBR322, ColE1, or p15A origin of replication sequence. In some embodiments, the origin of replication comprises a pSC101 origin of replication sequence. In some embodiments, the origin of replication comprises a CloDF13 origin of replication sequence. In some embodiments, the origin of replication comprises a CloE1 origin of replication sequence. In some embodiments, the origin of replication sequence comprises an origin of replication sequence shown in Table 3.

[0146] In some embodiments, the writing plasmid comprises: (i) a nucleic acid sequence encoding a fusion protein comprising a napDNAbp and a nucleic acid editing domain operably linked to a constitutive promoter, (ii) a nucleic acid sequence encoding a sgRNA operably linked to an inducible promoter, wherein the sgRNA is complementary to a target sequence, and (iii) an origin of replication. In some embodiments, the fusion protein is constitutively expressed. In some embodiments, the sgRNA associates with the napDNAbp under conditions (e.g., a stimulus) that induce the expression of the sgRNA, wherein the napDNAbp is constitutively expressed. In some embodiments, the inducible promoter is an anhydrotetracycline-inducible promoter. In some embodiments, the constitutive promoter is a constitutive Lac promoter.

[0147] In some embodiments, the writing plasmid comprises: (i) a nucleic acid sequence encoding a fusion protein comprising a napDNAbp and a nucleic acid editing domain operably linked to an inducible promoter, (ii) a nucleic acid sequence encoding a sgRNA operably linked to a constitutive promoter, wherein the sgRNA is complementary to a target sequence, and (iii) an origin of replication. In some embodiments, the sgRNA is constitutively expressed. In some embodiments, the sgRNA associates with the napDNAbp under conditions (e.g., a stimulus) that induce the expression of the fusion protein. In some embodiments, the inducible promoter is an anhydrotetracycline-inducible promoter. In some embodiments, the constitutive promoter is a constitutive Lac promoter.

[0148] In some embodiments, the writing plasmid comprises: (i) a nucleic acid sequence encoding a fusion protein comprising a napDNAbp and a nucleic acid editing domain operably linked to a first inducible promoter, (ii) a nucleic acid sequence encoding a sgRNA operably linked to a second inducible promoter, wherein the sgRNA is complementary to a target sequence, and (iii) an origin of replication. In some embodiments, the sgRNA associates with the napDNAbp only under conditions (e.g., a stimulus or set of stimuli) that induce the expression of the fusion protein and expression of the sgRNA. In some embodiments, the first inducible promoter is an anhydrotetracycline-inducible promoter. In some embodiments, the second inducible promoter is an IPTG-inducible promoter.

[0149] In some embodiments, the writing plasmid comprises: (i) a nucleic acid sequence encoding a fusion protein comprising a napDNAbp and a nucleic acid editing domain operably linked to a first inducible promoter, (ii) a nucleic acid sequence encoding a sgRNA operably linked to a second inducible promoter, wherein the sgRNA is complementary to a target sequence, and (iii) an origin of replication. In some embodiments, the sgRNA associates with the napDNAbp only under conditions (e.g., a stimulus or set of stimuli) that induce the expression of the fusion protein and expression of the sgRNA. In some embodiments, the first inducible promoter is an anhydrotetracycline-inducible promoter. In some embodiments, the second inducible promoter is an arabinose-inducible promoter.

[0150] In some embodiments, the writing plasmid comprises: (i) a nucleic acid sequence encoding a fusion protein comprising a napDNAbp and a nucleic acid editing domain operably linked to a first inducible promoter, (ii) a nucleic acid sequence encoding a sgRNA operably linked to a second inducible promoter, wherein the sgRNA is complementary to a target sequence, and (iii) an origin of replication. In some embodiments, the sgRNA associates with the napDNAbp only under conditions (e.g., a stimulus or set of stimuli) that induce the expression of the fusion protein and expression of the sgRNA. In some embodiments, the first inducible promoter is an anhydrotetracycline-inducible promoter. In some embodiments, the second inducible promoter is a rhamnose-inducible promoter.

[0151] In some embodiments, the writing plasmid comprises: (i) a nucleic acid sequence encoding a fusion protein comprising a napDNAbp and a nucleic acid editing domain operably linked to a first inducible promoter, (ii) a nucleic acid sequence encoding a sgRNA operably linked to a second inducible promoter, wherein the sgRNA is complementary to a target sequence, and (iii) an origin of replication. In some embodiments, the sgRNA associates with the napDNAbp only under conditions (e.g., a stimulus or set of stimuli) that induce the expression of the fusion protein and expression of the sgRNA. In some embodiments, the first inducible promoter is an anhydrotetracycline-inducible promoter. In some embodiments, the second inducible promoter is a phage shock promoter (PSP). In some embodiments, expression of the sgRBA is induced by the presence of a phage.

[0152] In some embodiments, the writing plasmid comprises: (i) a nucleic acid sequence encoding a fusion protein comprising a napDNAbp and a nucleic acid editing domain operably linked to a first inducible promoter, (ii) a nucleic acid sequence encoding a sgRNA operably linked to a second inducible promoter, wherein the sgRNA is complementary to a target sequence, and (iii) an origin of replication. In some embodiments, the sgRNA associates with the napDNAbp only under conditions (e.g., a stimulus or set of stimuli) that induce the expression of the fusion protein and expression of the sgRNA. In some embodiments, the first inducible promoter is a light-inducible promoter. In some embodiments, expression of the fusion protein is induced in the presence of light, wherein the light inhibits the binding of a repressor to the first inducible promoter. In some embodiments, the second inducible promoter is an IPTG-inducible promoter.

[0153] In some embodiments, the napDNAbp is a nuclease inactive napDNAbp that does not introduce a single-strand or double-strand break. In some embodiments, the napDNAbp is a RNA-programmable DNA binding protein. In some embodiments, the RNA-programmable DNA binding protein comprises a Cas9 domain, a Cpf1 domain, a CasX domain, a CasY domain, a C2c1 domain, a C2c2 domain, or a C2c3 domain. In some embodiments, the RNA-programmable DNA binding protein comprises a Cas9 domain. In some embodiments, the Cas9 domain is a nuclease inactive Cas9 (dCas9) domain, a Cas9 nickase (Cas9n) domain, or a nuclease active Cas9 domain. In some embodiments, the Cas9 domain is a nuclease inactive dCas9 domain. In some embodiments, the Cas9 domain is a Cas9 nickase (Cas9n) domain. In some embodiments, the Cas9 domain is a Cas9 domain from Streptococcus pyogenes (spCas9). In some embodiments, the Cas9 domain comprises an amino acid sequence that is at least about 70% identical, at least about 80% identical, at least about 90%, at least about 95%, at least about 98%, at least about 99%, at least about 99.5%, or at least about 99.9% identical to the amino acid sequence provided in any one of SEQ ID NOs: 10-260. In some embodiments, the Cas9 domain is a dCas9 domain that comprises a D10A and a H840A mutation in the amino acid sequence provided by SEQ ID NO: 10, or a corresponding mutation in any one of SEQ ID NOs: 11-260. In some embodiments, the dCas9 domain comprises the amino acid sequence of SEQ ID NO: 6. In some embodiments, the Cas9 domain is a Cas9n domain that comprises a D10A or a H840A mutation in the amino acid sequence provided by SEQ ID NO: 10, or a corresponding mutation in any one of SEQ ID NOs: 11-260. In some embodiments, the Cas9 domain is a Cas9n domain that comprises a D10A mutation in the amino acid sequence provided by SEQ ID NO: 10, or a corresponding mutation in any one of SEQ ID NOs: 11-260. In some embodiments, the Cas9 domain comprises the amino acid sequence of SEQ ID NO: 7.

[0154] In some embodiments, the nucleic acid editing domain comprises a deaminase, a nuclease, a nickase, a recombinase, a methyltransferase, a methylase, an acetylase, an acetyltransferase, a transcriptional activator, or a transcriptional repressor domain. In some embodiments, the nucleic acid editing domain comprises a deaminase domain. In some embodiments, the deaminase domain is selected from any of the deaminase domains provided herein. In some embodiments, the deaminase domain is a cytidine deaminase domain. In some embodiments, the cytidine deaminase domain comprises the amino acid sequence of any one of SEQ ID NOs: 350-389. In some embodiments, the cytidine deaminase domain is a deaminase domain from the apoplipoprotein B mRNA-editing complex (APOBEC) family. In some embodiments, the APOBEC family deaminase is selected from the group consisting of APOBEC1 deaminase, APOBEC2 deaminase, APOBEC3A deaminase, APOBEC3B deaminase, APOBEC3C deaminase, APOBEC3D deaminase, APOBEC3F deaminase, APOBEC3G deaminase, and APOBEC3H deaminase.

[0155] In some embodiments, the fusion protein comprises any of the fusion proteins provided herein. In some embodiments, the fusion protein comprises a Cas9 domain and a cytidine deaminase domain. In some embodiments, the Cas9 domain and the cytidine deaminase are linked via a linker. In some embodiments, the linker comprises the amino acid sequence of any one of SEQ ID NOs: 300-318. In some embodiments, the linker comprises the amino acid sequence SGSETPGTSESATPES (SEQ ID NO: 306). In some embodiments, the fusion protein comprises the amino acid sequence of any one of SEQ ID NOs: 540-542. In some embodiments, the fusion protein further comprises a uracil glycosylase inhibitor (UGI) domain. In some embodiments, the fusion protein comprises the amino acid sequence of any one of SEQ ID NOs: 543-550. In some embodiments, the fusion protein comprises the amino acid sequence of SEQ ID NO: 543. In some embodiments, the fusion protein comprises the amino acid sequence of SEQ ID NO: 544. In some embodiments, the fusion protein comprises a Cas9 domain and one or more adenosine deaminase domains. In some embodiments, one or more of the adenosine deaminase domains comprise the amino acid sequence of any one of SEQ ID NOs: 400-458. In some embodiments, the Cas9 domain and the adenosine deaminase are linked via a linker. In some embodiments, the linker comprises the amino acid sequence of any one of SEQ ID NOs: 300-318. In some embodiments, the fusion protein comprises the amino acid sequence of any one of SEQ ID NOs: 560-586. In some embodiments, the fusion protein further comprises a uracil glycosylase inhibitor (UGI) domain or a dISN domain.

[0156] In yet another aspect, provided herein are writing plasmids for use in prokaryotic systems comprising (i) a nucleic acid sequence encoding a fusion protein comprising a nucleic acid programmable DNA binding protein (napDNAbp) and a nucleic acid editing domain operably linked to a first promoter; (ii) a nucleic acid sequence encoding a first single guide RNA (sgRNA) operably linked to a second promoter; (iii) a nucleic acid sequence encoding a second single guide RNA (sgRNA) operably linked to a third promoter; and (iv) an origin of replication.

[0157] In some embodiments, the first sgRNA associates with the napDNAbp under conditions (e.g., a stimulus or set of stimuli) that induce the expression of the first sgRNA and expression of the fusion protein. In some embodiments, the first sgRNA is complementary to a target sequence. In some embodiments, the writing plasmid does not encode a first sgRNA. In some embodiments, the napDNAbp encoded by the writing plasmid associates with a first sgRNA expressed by a cell. In some embodiments, the napDNAbp associates with a first sgRNA under conditions (e.g., a stimulus) that induce the expression of the fusion protein, wherein the first sgRNA is expressed by a cell. In some embodiments, the second sgRNA associates with the napDNAbp under conditions (e.g., a stimulus or set of stimuli) that induce the expression of the second sgRNA and expression of the fusion protein. In some embodiments, the second sgRNA is complementary to a target sequence. In some embodiments, the first and the second sgRNA are not complementary to the same target sequence. In some embodiments, the writing plasmid does not encode a second sgRNA. In some embodiments, the napDNAbp encoded by the writing plasmid associates with a second sgRNA expressed by a cell. In some embodiments, the napDNAbp associates with a second sgRNA under conditions (e.g., a stimulus) that induce the expression of the fusion protein, wherein the second sgRNA is expressed by a cell.

[0158] In some embodiments, at least one of the promoters is induced by the presence of a stimulus. In some embodiments, the stimulus is a small molecule, a protein, a peptide, an amino acid, a metabolite, an inorganic molecule, an organometallic molecule, an organic molecule, a drug or drug candidate, a sugar, a lipid, a metal, a nucleic acid, a molecule produced during the activation of an endogenous or an exogenous signaling cascade, light, heat, sound, pressure, mechanical stress, shear stress, or a virus (e.g., phage) or other microorganism. In some embodiments, the stimulus is a phage. In some embodiments, the stimulus is light. In some embodiments, the stimulus is a small molecule. In some embodiments, the stimulus is a sugar. In some embodiments, the stimulus is an antibiotic. In some embodiments, the stimulus is anhydrotetracycline, IPTG, rhamnose, arabinose, tanespimycin, tunicamycin, or doxycycline. In some embodiments, at least one of the promoters is an inducible promoter. In some embodiments, at least one of the promoters is a constitutive promoter. In some embodiments, the first promoter, the second promoter, and the third promoter are different promoters. In some embodiments, the first promoter, the second promoter, and the third promoter are different inducible promoters.

[0159] In some embodiments, the first promoter is appropriate for use in a prokaryotic system. In some embodiments, the first promoter is appropriate for use in a bacterial (e.g., E. coli) system. In some embodiments, the first promoter is induced by the presence of a stimulus. In some embodiments, the stimulus is a small molecule, a protein, a peptide, an amino acid, a metabolite, an inorganic molecule, an organometallic molecule, an organic molecule, a drug or drug candidate, a sugar, a lipid, a metal, a nucleic acid, a molecule produced during the activation of an endogenous or an exogenous signaling cascade, light, heat, sound, pressure, mechanical stress, shear stress, or a virus (e.g., phage) or other microorganism. In some embodiments, the stimulus is a phage. In some embodiments, the stimulus is light. In some embodiments, the stimulus is a small molecule. In some embodiments, the stimulus is a sugar. In some embodiments, the stimulus is an antibiotic. In some embodiments, the stimulus is anhydrotetracycline, IPTG, rhamnose, arabinose, tanespimycin, tunicamycin, or doxycycline. In some embodiments, the first promoter is an inducible promoter. In some embodiments, the inducible promoter is an anhydrotetracycline-inducible promoter, IPTG-inducible promoter, rhamnose-inducible promoter, arabinose-inducible promoter, a tetracycline-inducible promoter, a light-inducible promoter, a heat-inducible promoter, or a phage shock promoter (PSP). In some embodiments, the inducible promoter is an anhydrotetracycline-inducible promoter. In some embodiments, the inducible promoter is selected from the inducible promoters shown in Table 7. In some embodiments, the first promoter is a constitutive promoter. In some embodiments, the constitutive promoter is a constitutive Lac promoter. In some embodiments, the constitutive promoter is selected from the constitutive promoters shown in Table 7.

[0160] In some embodiments, the second promoter is appropriate for use in a prokaryotic system. In some embodiments, the second promoter is appropriate for use in a bacterial (e.g., E. coli) system. In some embodiments, the second promoter is induced by the presence of a stimulus. In some embodiments, the stimulus is a small molecule, a protein, a peptide, an amino acid, a metabolite, a sugar, a molecule produced during the activation of an endogenous or exogenous signaling cascade, light, heat, mechanical stress, or a virus (e.g., phage). In some embodiments, the stimulus is anhydrotetracycline, IPTG, rhamnose, arabinose, tanespimycin, tunicamycin, or doxycycline. In some embodiments, the second promoter is an inducible promoter. In some embodiments, the inducible promoter is an anhydrotetracycline-inducible promoter, IPTG-inducible promoter, rhamnose-inducible promoter, arabinose-inducible promoter, a tetracycline-inducible promoter, a light-inducible promoter, a heat-inducible promoter, or a phage shock promoter (PSP). In some embodiments, the inducible promoter is an IPTG-inducible promoter. In some embodiments, the inducible promoter is an arabinose-inducible promoter. In some embodiments, the inducible promoter is a rhamnose-inducible promoter. In some embodiments, the inducible promoter is selected from the inducible promoters shown in Table 7. In some embodiments, the second promoter is a constitutive promoter. In some embodiments, the constitutive promoter is a constitutive Lac promoter. In some embodiments, the constitutive promoter is selected from the constitutive promoters shown in Table 7.

[0161] In some embodiments, the third promoter is appropriate for use in a prokaryotic system. In some embodiments, the third promoter is appropriate for use in a bacterial (e.g., E. coli) system. In some embodiments, the third promoter is induced by the presence of a stimulus. In some embodiments, the stimulus is a small molecule, a protein, a peptide, an amino acid, a metabolite, an inorganic molecule, an organometallic molecule, an organic molecule, a drug or drug candidate, a sugar, a lipid, a metal, a nucleic acid, a molecule produced during the activation of an endogenous or an exogenous signaling cascade, light, heat, sound, pressure, mechanical stress, shear stress, or a virus (e.g., phage) or other microorganism. In some embodiments, the stimulus is a phage. In some embodiments, the stimulus is light. In some embodiments, the stimulus is a small molecule. In some embodiments, the stimulus is a sugar. In some embodiments, the stimulus is an antibiotic. In some embodiments, the stimulus is anhydrotetracycline, IPTG, rhamnose, arabinose, tanespimycin, tunicamycin, or doxycycline. In some embodiments, the third promoter is an inducible promoter. In some embodiments, the inducible promoter is an anhydrotetracycline-inducible promoter, IPTG-inducible promoter, rhamnose-inducible promoter, arabinose-inducible promoter, a tetracycline-inducible promoter, a light-inducible promoter, a heat-inducible promoter, or a phage shock promoter (PSP). In some embodiments, the inducible promoter is an IPTG-inducible promoter. In some embodiments, the inducible promoter is an arabinose-inducible promoter. In some embodiments, the inducible promoter is a rhamnose-inducible promoter. In some embodiments, the inducible promoter is selected from the inducible promoters shown in Table 7. In some embodiments, the third promoter is a constitutive promoter. In some embodiments, the constitutive promoter is a constitutive Lac promoter. In some embodiments, the constitutive promoter is selected from the constitutive promoters shown in Table 7.

[0162] In some embodiments, the origin of replication (ORI) comprises a nucleic acid sequence suitable for use in a prokaryotic system. In some embodiments, the origin of replication (ORI) comprises a bacterial origin of replication sequence. In some embodiments, the origin of replication comprises a CloDF13, CloE1, pSC101, pMB1, pBR322, ColE1, or p15A origin of replication sequence. In some embodiments, the origin of replication comprises a pSC101 origin of replication sequence. In some embodiments, the origin of replication comprises a CloDF13 origin of replication sequence. In some embodiments, the origin of replication comprises a CloE1 origin of replication sequence. In some embodiments, the origin of replication sequence comprises an origin of replication sequence shown in Table 3.

[0163] In some embodiments, the writing plasmid comprises: (i) a nucleic acid sequence encoding a fusion protein comprising a napDNAbp and a nucleic acid editing domain operably linked to a first inducible promoter, (ii) a nucleic acid sequence encoding a first sgRNA operably linked to a second inducible promoter, wherein the first sgRNA is complementary to a target sequence, (iii) a nucleic acid sequence encoding a second sgRNA operably linked to a third inducible promoter, wherein the second sgRNA is complementary to a target sequence, and (iv) an origin of replication. In some embodiments, the first sgRNA associates with the napDNAbp only under conditions (e.g., a stimulus or set of stimuli) that induce the expression of the fusion protein and the expression of the first sgRNA. In some embodiments, the second sgRNA associates with the napDNAbp only under conditions (e.g., a stimulus or set of stimuli) that induce the expression of the fusion protein and the expression of the second sgRNA. In some embodiments, the first inducible promoter is an anhydrotetracycline-inducible promoter. In some embodiments, the second inducible promoter is an arabinose-inducible promoter. In some embodiments, the third inducible promoter is a rhamnose-inducible promoter.

[0164] In some embodiments, the napDNAbp is a nuclease inactive napDNAbp that does not introduce a single-strand or double-strand break. In some embodiments, the napDNAbp is a RNA-programmable DNA binding protein. In some embodiments, the RNA-programmable DNA binding protein comprises a Cas9 domain, a Cpf1 domain, a CasX domain, a CasY domain, a C2c1 domain, a C2c2 domain, or a C2c3 domain. In some embodiments, the RNA-programmable DNA binding protein comprises a Cas9 domain. In some embodiments, the Cas9 domain is a nuclease inactive Cas9 (dCas9) domain, a Cas9 nickase (Cas9n) domain, or a nuclease active Cas9 domain. In some embodiments, the Cas9 domain is a nuclease inactive dCas9 domain. In some embodiments, the Cas9 domain is a Cas9 nickase (Cas9n) domain. In some embodiments, the Cas9 domain is a Cas9 domain from Streptococcus pyogenes (spCas9). In some embodiments, the Cas9 domain comprises an amino acid sequence that is at least about 70% identical, at least about 80% identical, at least about 90%, at least about 95%, at least about 98%, at least about 99%, at least about 99.5%, or at least about 99.9% identical to the amino acid sequence provided in any one of SEQ ID NOs: 10-260. In some embodiments, the Cas9 domain is a dCas9 domain that comprises a D10A and a H840A mutation in the amino acid sequence provided by SEQ ID NO: 10, or a corresponding mutation in any one of SEQ ID NOs: 11-260. In some embodiments, the dCas9 domain comprises the amino acid sequence of SEQ ID NO: 6. In some embodiments, the Cas9 domain is a Cas9n domain that comprises a D10A or a H840A mutation in the amino acid sequence provided by SEQ ID NO: 10, or a corresponding mutation in any one of SEQ ID NOs: 11-260. In some embodiments, the Cas9 domain is a Cas9n domain that comprises a D10A mutation in the amino acid sequence provided by SEQ ID NO: 10, or a corresponding mutation in any one of SEQ ID NOs: 11-260. In some embodiments, the Cas9 domain comprises the amino acid sequence of SEQ ID NO: 7.

[0165] In some embodiments, the nucleic acid editing domain comprises a deaminase, a nuclease, a nickase, a recombinase, a methyltransferase, a methylase, an acetylase, an acetyltransferase, a transcriptional activator, or a transcriptional repressor domain. In some embodiments, the nucleic acid editing domain comprises a deaminase domain. In some embodiments, the deaminase domain is selected from any of the deaminase domains provided herein. In some embodiments, the deaminase domain is a cytidine deaminase domain. In some embodiments, the cytidine deaminase domain comprises the amino acid sequence of any one of SEQ ID NOs: 350-389. In some embodiments, the cytidine deaminase domain is a deaminase domain from the apoplipoprotein B mRNA-editing complex (APOBEC) family. In some embodiments, the APOBEC family deaminase is selected from the group consisting of APOBEC1 deaminase, APOBEC2 deaminase, APOBEC3A deaminase, APOBEC3B deaminase, APOBEC3C deaminase, APOBEC3D deaminase, APOBEC3F deaminase, APOBEC3G deaminase, and APOBEC3H deaminase.

[0166] In some embodiments, the fusion protein comprises any of the fusion proteins described herein. In some embodiments, the fusion protein comprises a Cas9 domain and a cytidine deaminase domain. In some embodiments, the Cas9 domain and the cytidine deaminase are linked via a linker. In some embodiments, the linker comprises the amino acid sequence of any one of SEQ ID NOs: 300-318. In some embodiments, the linker comprises the amino acid sequence SGSETPGTSESATPES (SEQ ID NO: 306). In some embodiments, the fusion protein comprises the amino acid sequence of any one of SEQ ID NOs: 540-542. In some embodiments, the fusion protein further comprises a uracil glycosylase inhibitor (UGI) domain. In some embodiments, the fusion protein comprises the amino acid sequence of any one of SEQ ID NOs: 543-550. In some embodiments, the fusion protein comprises the amino acid sequence of SEQ ID NO: 543. In some embodiments, the fusion protein comprises the amino acid sequence of SEQ ID NO: 544. In some embodiments, the fusion protein comprises a Cas9 domain and one or more adenosine deaminase domains. In some embodiments, one or more of the adenosine deaminase domains comprise the amino acid sequence of any one of SEQ ID NOs: 400-458. In some embodiments, the Cas9 domain and the adenosine deaminase are linked via a linker. In some embodiments, the linker comprises the amino acid sequence of any one of SEQ ID NOs: 300-318. In some embodiments, the fusion protein comprises the amino acid sequence of any one of SEQ ID NOs: 560-586. In some embodiments, the fusion protein further comprises a uracil glycosylase inhibitor (UGI) domain or a dISN domain.

[0167] In yet another aspect, provided herein are writing plasmids for use in prokaryotic systems comprising: (i) a nucleic acid sequence encoding a fusion protein comprising a nucleic acid programmable DNA binding protein (napDNAbp) and a nucleic acid editing domain operably linked to a first promoter; (ii) a nucleic acid sequence encoding a first single guide RNA (sgRNA) operably linked to a second promoter; (iii) a nucleic acid sequence encoding a second single guide RNA (sgRNA) operably linked to a third promoter; (iv) a nucleic acid sequence encoding a third single guide RNA (sgRNA) operably linked to a fourth promoter; and (iv) an origin of replication.

[0168] In some embodiments, the first sgRNA associates with the napDNAbp under conditions (e.g., a stimulus or set of stimuli) that induce the expression of the first sgRNA and expression of the fusion protein. In some embodiments, the first sgRNA is complementary to a target sequence. In some embodiments, the writing plasmid does not encode a first sgRNA. In some embodiments, the napDNAbp encoded by the writing plasmid associates with a first sgRNA expressed by a cell. In some embodiments, the napDNAbp associates with a first sgRNA under conditions (e.g., a stimulus) that induce the expression of the fusion protein, wherein the first sgRNA is expressed by a cell. In some embodiments, the second sgRNA associates with the napDNAbp under conditions (e.g., a stimulus or set of stimuli) that induce the expression of the second sgRNA and expression of the fusion protein. In some embodiments, the second sgRNA is complementary to a target sequence. In some embodiments, the first and the second sgRNA are not complementary to the same target sequence. In some embodiments, the writing plasmid does not encode a second sgRNA. In some embodiments, the napDNAbp encoded by the writing plasmid associates with a second sgRNA expressed by a cell. In some embodiments, the napDNAbp associates with a second sgRNA under conditions (e.g., a stimulus) that induce the expression of the fusion protein, wherein the second sgRNA is expressed by a cell. In some embodiments, the third sgRNA associates with the napDNAbp under conditions (e.g., a stimulus or set of stimuli) that induce the expression of the third sgRNA and expression of the fusion protein. In some embodiments, the third sgRNA is complementary to a target sequence. In some embodiments, the first, the second, and the third sgRNA are not complementary to the same target sequence. In some embodiments, the writing plasmid does not encode a third sgRNA. In some embodiments, the napDNAbp encoded by the writing plasmid associates with a third sgRNA expressed by a cell. In some embodiments, the napDNAbp associates with a third sgRNA under conditions (e.g., a stimulus) that induce the expression of the fusion protein, wherein the third sgRNA is expressed by a cell.

[0169] In some embodiments, at least one of the promoters is induced by the presence of a stimulus. In some embodiments, the stimulus is a small molecule, a protein, a peptide, an amino acid, a metabolite, a sugar, a molecule produced during the activation of an endogenous or exogenous signaling cascade, light, heat, mechanical stress, or a virus (e.g., phage). In some embodiments, the stimulus is anhydrotetracycline, IPTG, rhamnose, arabinose, tanespimycin, tunicamycin, or doxycycline. In some embodiments, at least one of the promoters is an inducible promoter. In some embodiments, at least one of the promoters is a constitutive promoter. In some embodiments, the first promoter, the second promoter, the third promoter, and the fourth promoter are different promoters. In some embodiments, the first promoter, the second promoter, the third promoter, and the fourth promoter are different inducible promoters.

[0170] In some embodiments, the first promoter is appropriate for use in a prokaryotic system. In some embodiments, the first promoter is appropriate for use in a bacterial (e.g., E. coli) system. In some embodiments, the first promoter is induced by the presence of a stimulus. In some embodiments, the stimulus is a small molecule, a protein, a peptide, an amino acid, a metabolite, an inorganic molecule, an organometallic molecule, an organic molecule, a drug or drug candidate, a sugar, a lipid, a metal, a nucleic acid, a molecule produced during the activation of an endogenous or an exogenous signaling cascade, light, heat, sound, pressure, mechanical stress, shear stress, or a virus (e.g., phage) or other microorganism. In some embodiments, the stimulus is a phage. In some embodiments, the stimulus is light. In some embodiments, the stimulus is a small molecule. In some embodiments, the stimulus is a sugar. In some embodiments, the stimulus is an antibiotic. In some embodiments, the stimulus is anhydrotetracycline, IPTG, rhamnose, arabinose, tanespimycin, tunicamycin, or doxycycline. In some embodiments, the first promoter is an inducible promoter. In some embodiments, the inducible promoter is an anhydrotetracycline-inducible promoter, IPTG-inducible promoter, rhamnose-inducible promoter, arabinose-inducible promoter, a tetracycline-inducible promoter, a light-inducible promoter, a heat-inducible promoter, or a phage shock promoter (PSP). In some embodiments, the inducible promoter is an anhydrotetracycline-inducible promoter. In some embodiments, the inducible promoter is selected from the inducible promoters shown in Table 7. In some embodiments, the first promoter is a constitutive promoter. In some embodiments, the constitutive promoter is a constitutive Lac promoter. In some embodiments, the constitutive promoter is selected from the constitutive promoters shown in Table 7.

[0171] In some embodiments, the second promoter is appropriate for use in a prokaryotic system. In some embodiments, the second promoter is appropriate for use in a bacterial (e.g., E. coli) system. In some embodiments, the second promoter is induced by the presence of a stimulus. In some embodiments, the stimulus is a small molecule, a protein, a peptide, an amino acid, a metabolite, an inorganic molecule, an organometallic molecule, an organic molecule, a drug or drug candidate, a sugar, a lipid, a metal, a nucleic acid, a molecule produced during the activation of an endogenous or an exogenous signaling cascade, light, heat, sound, pressure, mechanical stress, shear stress, or a virus (e.g., phage) or other microorganism. In some embodiments, the stimulus is a phage. In some embodiments, the stimulus is light. In some embodiments, the stimulus is a small molecule. In some embodiments, the stimulus is a sugar. In some embodiments, the stimulus is an antibiotic. In some embodiments, the stimulus is anhydrotetracycline, IPTG, rhamnose, arabinose, tanespimycin, tunicamycin, or doxycycline. In some embodiments, the second promoter is an inducible promoter. In some embodiments, the inducible promoter is an anhydrotetracycline-inducible promoter, IPTG-inducible promoter, rhamnose-inducible promoter, arabinose-inducible promoter, a tetracycline-inducible promoter, a light-inducible promoter, a heat-inducible promoter, or a phage shock promoter (PSP). In some embodiments, the inducible promoter is an IPTG-inducible promoter. In some embodiments, the inducible promoter is an arabinose-inducible promoter. In some embodiments, the inducible promoter is a rhamnose-inducible promoter. In some embodiments, the inducible promoter is selected from the inducible promoters shown in Table 7. In some embodiments, the second promoter is a constitutive promoter. In some embodiments, the constitutive promoter is a constitutive Lac promoter. In some embodiments, the constitutive promoter is selected from the constitutive promoters shown in Table 7.

[0172] In some embodiments, the third promoter is appropriate for use in a prokaryotic system. In some embodiments, the third promoter is appropriate for use in a bacterial (e.g., E. coli) system. In some embodiments, the third promoter is induced by the presence of a stimulus. In some embodiments, the stimulus is a small molecule, a protein, a peptide, an amino acid, a metabolite, an inorganic molecule, an organometallic molecule, an organic molecule, a drug or drug candidate, a sugar, a lipid, a metal, a nucleic acid, a molecule produced during the activation of an endogenous or an exogenous signaling cascade, light, heat, sound, pressure, mechanical stress, shear stress, or a virus (e.g., phage) or other microorganism. In some embodiments, the stimulus is a phage. In some embodiments, the stimulus is light. In some embodiments, the stimulus is a small molecule. In some embodiments, the stimulus is a sugar. In some embodiments, the stimulus is an antibiotic. In some embodiments, the stimulus is anhydrotetracycline, IPTG, rhamnose, arabinose, tanespimycin, tunicamycin, or doxycycline. In some embodiments, the third promoter is an inducible promoter. In some embodiments, the inducible promoter is an anhydrotetracycline-inducible promoter, IPTG-inducible promoter, rhamnose-inducible promoter, arabinose-inducible promoter, a tetracycline-inducible promoter, a light-inducible promoter, a heat-inducible promoter, or a phage shock promoter (PSP). In some embodiments, the inducible promoter is an IPTG-inducible promoter. In some embodiments, the inducible promoter is an arabinose-inducible promoter. In some embodiments, the inducible promoter is a rhamnose-inducible promoter. In some embodiments, the inducible promoter is selected from the inducible promoters shown in Table 7. In some embodiments, the third promoter is a constitutive promoter. In some embodiments, the constitutive promoter is a constitutive Lac promoter. In some embodiments, the constitutive promoter is selected from the constitutive promoters shown in Table 7.

[0173] In some embodiments, the fourth promoter is appropriate for use in a prokaryotic system. In some embodiments, the fourth promoter is appropriate for use in a bacterial (e.g., E. coli) system. In some embodiments, the fourth promoter is induced by the presence of a stimulus. In some embodiments, the stimulus is a small molecule, a protein, a peptide, an amino acid, a metabolite, an inorganic molecule, an organometallic molecule, an organic molecule, a drug or drug candidate, a sugar, a lipid, a metal, a nucleic acid, a molecule produced during the activation of an endogenous or an exogenous signaling cascade, light, heat, sound, pressure, mechanical stress, shear stress, or a virus (e.g., phage) or other microorganism. In some embodiments, the stimulus is a phage. In some embodiments, the stimulus is light. In some embodiments, the stimulus is a small molecule. In some embodiments, the stimulus is a sugar. In some embodiments, the stimulus is an antibiotic. In some embodiments, the stimulus is anhydrotetracycline, IPTG, rhamnose, arabinose, tanespimycin, tunicamycin, or doxycycline. In some embodiments, the fourth promoter is an inducible promoter. In some embodiments, the inducible promoter is an anhydrotetracycline-inducible promoter, IPTG-inducible promoter, rhamnose-inducible promoter, arabinose-inducible promoter, a tetracycline-inducible promoter, a light-inducible promoter, a heat-inducible promoter, or a phage shock promoter (PSP). In some embodiments, the inducible promoter is an IPTG-inducible promoter. In some embodiments, the inducible promoter is an arabinose-inducible promoter. In some embodiments, the inducible promoter is a rhamnose-inducible promoter. In some embodiments, the inducible promoter is selected from the inducible promoters shown in Table 7. In some embodiments, the fourth promoter is a constitutive promoter. In some embodiments, the constitutive promoter is a constitutive Lac promoter. In some embodiments, the constitutive promoter is selected from the constitutive promoters shown in Table 7.

[0174] In some embodiments, the origin of replication (ORI) comprises a nucleic acid sequence suitable for use in a prokaryotic system. In some embodiments, the origin of replication (ORI) comprises a bacterial origin of replication sequence. In some embodiments, the origin of replication comprises a CloDF13, CloE1, pSC101, pMB1, pBR322, ColE1, or p15A origin of replication sequence. In some embodiments, the origin of replication comprises a pSC101 origin of replication sequence. In some embodiments, the origin of replication comprises a CloDF13 origin of replication sequence. In some embodiments, the origin of replication comprises a CloE1 origin of replication sequence. In some embodiments, the origin of replication sequence comprises an origin of replication sequence shown in Table 3.

[0175] In some embodiments, the writing plasmid comprises: (i) a nucleic acid sequence encoding a fusion protein comprising a napDNAbp and a nucleic acid editing domain operably linked to a first inducible promoter, (ii) a nucleic acid sequence encoding a first sgRNA operably linked to a second inducible promoter, wherein the first sgRNA is complementary to a target sequence, (iii) a nucleic acid encoding a second sgRNA operably linked to a third inducible promoter, wherein the second sgRNA is complementary to a target sequence, (iv) a nucleic acid molecule encoding a third sgRNA operably linked to a fourth inducible promoter, wherein the third sgRNA is complementary to a target sequence, and (v) an origin of replication. In some embodiments, the first sgRNA associates with the napDNAbp only under conditions (e.g., a stimulus or set of stimuli) that induce the expression of the fusion protein and the first sgRNA. In some embodiments, the second sgRNA associates with the napDNAbp only under conditions (e.g., a stimulus or set of stimuli) that induce the expression of the fusion protein and the second sgRNA. In some embodiments, the third sgRNA associates with the napDNAbp only under conditions (e.g., a stimulus or set of stimuli) that the expression of the fusion protein and the third sgRNA. In some embodiments, the first inducible promoter is an anhydrotetracycline-inducible promoter. In some embodiments, the second inducible promoter is an IPTG-inducible promoter. In some embodiments, the third inducible promoter is an arabinose-inducible promoter. In some embodiments, and the fourth inducible promoter is a rhamnose-inducible promoter.

[0176] In some embodiments, the napDNAbp is a nuclease inactive napDNAbp that does not introduce a single-strand or double-strand break. In some embodiments, the napDNAbp is a RNA-programmable DNA binding protein. In some embodiments, the RNA-programmable DNA binding protein comprises a Cas9 domain, a Cpf1 domain, a CasX domain, a CasY domain, a C2c1 domain, a C2c2 domain, or a C2c3 domain. In some embodiments, the RNA-programmable DNA binding protein comprises a Cas9 domain. In some embodiments, the Cas9 domain is a nuclease inactive Cas9 (dCas9) domain, a Cas9 nickase (Cas9n) domain, or a nuclease active Cas9 domain. In some embodiments, the Cas9 domain is a nuclease inactive dCas9 domain. In some embodiments, the Cas9 domain is a Cas9 nickase (Cas9n) domain. In some embodiments, the Cas9 domain is a Cas9 domain from Streptococcus pyogenes (spCas9). In some embodiments, the Cas9 domain comprises an amino acid sequence that is at least about 70% identical, at least about 80% identical, at least about 90%, at least about 95%, at least about 98%, at least about 99%, at least about 99.5%, or at least about 99.9% identical to the amino acid sequence provided in any one of SEQ ID NOs: 10-260. In some embodiments, the Cas9 domain is a dCas9 domain that comprises a D10A and a H840A mutation in the amino acid sequence provided by SEQ ID NO: 10, or a corresponding mutation in any one of SEQ ID NOs: 11-260. In some embodiments, the dCas9 domain comprises the amino acid sequence of SEQ ID NO: 6. In some embodiments, the Cas9 domain is a Cas9n domain that comprises a D10A or a H840A mutation in the amino acid sequence provided by SEQ ID NO: 10, or a corresponding mutation in any one of SEQ ID NOs: 11-260. In some embodiments, the Cas9 domain is a Cas9n domain that comprises a D10A mutation in the amino acid sequence provided by SEQ ID NO: 10, or a corresponding mutation in any one of SEQ ID NOs: 11-260. In some embodiments, the Cas9 domain comprises the amino acid sequence of SEQ ID NO: 7.

[0177] In some embodiments, the nucleic acid editing domain comprises a deaminase, a nuclease, a nickase, a recombinase, a methyltransferase, a methylase, an acetylase, an acetyltransferase, a transcriptional activator, or a transcriptional repressor domain. In some embodiments, the nucleic acid editing domain comprises a deaminase domain. In some embodiments, the deaminase domain is selected from any of the deaminase domains provided herein. In some embodiments, the deaminase domain is a cytidine deaminase domain. In some embodiments, the cytidine deaminase domain comprises the amino acid sequence of any one of SEQ ID NOs: 350-389. In some embodiments, the cytidine deaminase domain is a deaminase domain from the apoplipoprotein B mRNA-editing complex (APOBEC) family. In some embodiments, the APOBEC family deaminase is selected from the group consisting of APOBEC1 deaminase, APOBEC2 deaminase, APOBEC3A deaminase, APOBEC3B deaminase, APOBEC3C deaminase, APOBEC3D deaminase, APOBEC3F deaminase, APOBEC3G deaminase, and APOBEC3H deaminase.

[0178] In some embodiments, the fusion protein comprises any of the fusion proteins provided herein. In some embodiments, the fusion protein comprises a Cas9 domain and a cytidine deaminase domain. In some embodiments, the Cas9 domain and the cytidine deaminase are linked via a linker. In some embodiments, the linker comprises the amino acid sequence of any one of SEQ ID NOs: 300-318. In some embodiments, the linker comprises the amino acid sequence SGSETPGTSESATPES (SEQ ID NO: 306). In some embodiments, the fusion protein comprises the amino acid sequence of any one of SEQ ID NOs: 540-542. In some embodiments, the fusion protein further comprises a uracil glycosylase inhibitor (UGI) domain. In some embodiments, the fusion protein comprises the amino acid sequence of any one of SEQ ID NOs: 543-550. In some embodiments, the fusion protein comprises the amino acid sequence of SEQ ID NO: 543. In some embodiments, the fusion protein comprises the amino acid sequence of SEQ ID NO: 544. In some embodiments, the fusion protein comprises a Cas9 domain and one or more adenosine deaminase domains. In some embodiments, one or more of the adenosine deaminase domains comprise the amino acid sequence of any one of SEQ ID NOs: 400-458. In some embodiments, the Cas9 domain and the adenosine deaminase are linked via a linker. In some embodiments, the linker comprises the amino acid sequence of any one of SEQ ID NOs: 300-318. In some embodiments, the fusion protein comprises the amino acid sequence of any one of SEQ ID NOs: 560-586. In some embodiments, the fusion protein further comprises a uracil glycosylase inhibitor (UGI) domain or a dISN domain.

[0179] One of ordinary skill in the art will recognize based on this disclosure and knowledge in the field that additional promoters operably linked to additional sgRNA sequences, or additional fusion proteins (e.g., comprising an orthogonal napDNAbp, such as an orthogonal Cas9 domain) operably linked to additional promoters, can be included in each of the writing plasmids for use in a prokaryotic system (e.g., a prokaryotic cell) described above, and thus the disclosure in not limited in that regard. In some embodiments, the prokaryotic system is a bacterial system (e.g., a bacterial cell). In some embodiments, the bacterial system is an E. coli system (e.g., an E coli cell).

[0180] In another aspect, provided herein are writing plasmids for use in eukaryotic cells comprising (i) a nucleic acid sequence encoding a fusion protein comprising a nucleic acid programmable DNA binding protein (napDNAbp) and a nucleic acid editing domain operably linked to a promoter; and (ii) an origin of replication.

[0181] In some embodiments, the writing plasmid does not encode a sgRNA. In some embodiments, the napDNAbp of the fusion protein encoded by the writing plasmid associates with a sgRNA expressed by a cell. In some embodiments, the napDNAbp of the fusion protein associates with a sgRNA under conditions (e.g., a stimulus) that induce the expression of the fusion protein, wherein the sgRNA is expressed by a cell. In some embodiments, the sgRNA is complementary to a target sequence.

[0182] In some embodiments, the promoter is appropriate for use in a eukaryotic system. In some embodiments, the promoter is appropriate for use in a mammalian (e.g., human) system. In some embodiments, the promoter is induced by the presence of a stimulus. In some embodiments, the stimulus is a small molecule, a protein, a peptide, an amino acid, a metabolite, an inorganic molecule, an organometallic molecule, an organic molecule, a drug or drug candidate, a sugar, a lipid, a metal, a nucleic acid, a molecule produced during the activation of an endogenous or an exogenous signaling cascade, light, heat, sound, pressure, mechanical stress, shear stress, or a virus (e.g., phage) or other microorganism. In some embodiments, the stimulus is a phage. In some embodiments, the stimulus is light. In some embodiments, the stimulus is a small molecule. In some embodiments, the stimulus is a sugar. In some embodiments, the stimulus is an antibiotic. In some embodiments, the stimulus is a molecule produced during the activation of an endogenous or exogenous signaling pathway. In some embodiments, the endogenous signaling cascade is the Wnt signaling cascade. In some embodiments, the molecule produced during the activation of the Wnt signaling cascade (i.e., the stimulus) is beta-catenin. In certain embodiments, the endogenous signaling cascade is, for example, an NF-κB, SMADs, Signal Transducer and Activator of Transcription 1 (STAT1), STAT2, STAT3, interferon regulatory factor-1 (IRF-1), or E2F cascade. In some such embodiments, the stimulus is a cytokine or growth factor such as Tumor Necrosis Factor (TNF), Transforming Growth Factor β (TGF-β), Interleukin 6 (IL-6), Interferon β (IFNβ), IFNγ, or Epidermal Growth Factor (EGF). In some embodiments, the endogenous signaling cascade is, for example, a cAMP Response Element-Binding protein (CREB), CCAAT-Enhancer-Binding protein (C/EBP), Serum Response Factor (SRF), Nuclear Factor of Activated T-cells (NFAT), Glucocorticoid Receptor (GR), Mitogen Activated Protein Kinase/c-Jun N-terminal Kinase (MAPK/JNK), GATA transcription factor (GATA), Retinoic Acid Receptor (RAR), Retinoid X Receptor (RXR), Vitamin D Receptor (VDR), Adenylate-Uridylate element (ARE), or a Xenobiotic/Dioxin-Responsive Element (XRE/DRE) cascade. In certain such embodiments the stimulus is a small molecule such as forskolin, lithium chloride (LiCl), phorbol 12-myristate 13-acetate (PMA), dexamethasone, all-trans retinoic acid (ATRA), calcitriol, sulforaphane, or 2,3,7,8-tetrachlorodibenzodioxin (TCDD). In some embodiments, the endogenous signaling cascade is a Heat Shock Factor (HSF), Activating Transcription Factor 6 (ATF6), or CCAAT-binding Factor/Nuclear Transcription Factor Y/Transcriptional Factor Yin Yang 1 (CBF/NF-Y/YY1) cascade. In some embodiments, the stimulus is anhydrotetracycline, IPTG, rhamnose, arabinose, tanespimycin, tunicamycin, or doxycycline. In some embodiments, the stimulus is doxycycline. In some embodiments, the promoter is an inducible promoter. In some embodiments, the inducible promoter is an inducible RNA polymerase III promoter, a tetracycline-inducible promoter, a light-inducible promoter, a heat-inducible promoter, a promoter induced by the presence of a virus, or a promoter induced by mechanical stress. In some embodiments, the inducible promoter is an tetracycline-inducible promoter. In some embodiments, the inducible RNA polymerase III promoter is an IPTG-inducible RNA polymerase III promoter or a tetracycline-inducible RNA polymerase III promoter. In some embodiments, the inducible promoter is selected from the inducible promoters shown in Table 8 or Table 10. In some embodiments, the promoter is a constitutive promoter. In some embodiments, the constitutive promoter is a constitutive cytomegalovirus (CMV) promoter, a constitutive RNA polymerase III promoter, or a UBC promoter. In some embodiments, the constitutive promoter is selected from the constitutive promoters shown in Table 8. In some embodiments, the constitutive or the inducible promoter comprises a P2A sequence. In some embodiments, the constitutive or the inducible RNA polymerase III promoter comprises a U6 promoter sequence or an H1 promoter sequence.

[0183] In some embodiments, the origin of replication (ORI) comprises a nucleic acid sequence suitable for use in a eukaryotic system. In some embodiments, the origin of replication (ORI) comprises a eukaryotic origin of replication sequence. In some embodiments, the origin of replication comprises a CloE1 origin of replication sequence. In some embodiments, the origin of replication sequence comprises an origin of replication sequence shown in Table 3.

[0184] In some embodiments, the writing plasmid comprises: (i) a nucleic acid sequence encoding a fusion protein comprising a napDNAbp and a nucleic acid editing domain operably linked to a first constitutive promoter, and (ii) an origin of replication. In some embodiments, the fusion protein is constitutively expressed. In some embodiments, this writing plasmid is used in combination with a second plasmid comprising a nucleic acid encoding a first sgRNA operably liked to a second constitutive promoter, wherein the first sgRNA is complementary to a first target sequence. In some embodiments, the fusion protein and the first sgRNA are constitutively expressed, and the first sgRNA associates with the napDNAbp. In some embodiments, this writing plasmid is used in combination with a third plasmid comprising a nucleic acid encoding a second sgRNA operably liked to a third constitutive promoter, wherein the second sgRNA is complementary to a second target sequence. In some embodiments, the fusion protein and the second sgRNA are constitutively expressed, and the second sgRNA associates with the napDNAbp. In some embodiments, this writing plasmid is used in combination with a fourth plasmid comprising a nucleic acid encoding a third sgRNA operably liked to a fourth constitutive promoter, wherein the third sgRNA is complementary to a third target sequence. In some embodiments, the fusion protein and the third sgRNA are constitutively expressed, and the third sgRNA associates with the napDNAbp. In some embodiments, the first, second, and third sgRNAs are not identical. In some embodiments, the first, second, and third sgRNAs are each independently complementary to a different target sequence. In some embodiments, any one of the first, second, third, and/or fourth constitutive promoter is selected from the constitutive promoters listed in Table 8. In some embodiments, the first constitutive promoter is a CMV promoter. In some embodiments, the second, third, and/or fourth constitutive promoters are different. In some embodiments, the second, third, and/or fourth constitutive promoters are the same. In some embodiments, the second, third, and/or fourth constitutive promoter comprises a U6 promoter sequence. In some embodiments, any one of the first, second, third, and/or fourth promoters can be an inducible promoter. In some embodiments, the inducible promoter is selected from a inducible promoter listed in Table 8 or Table 10.

[0185] In some embodiments, the napDNAbp is a napDNAbp capable of introducing a single-strand break. In some embodiments, the napDNAbp is a RNA-programmable DNA binding protein. In some embodiments, the RNA-programmable DNA binding protein comprises a Cas9 domain, a Cpf1 domain, a CasX domain, a CasY domain, a C2c1 domain, a C2c2 domain, or a C2c3 domain. In some embodiments, the RNA-programmable DNA binding protein comprises a Cas9 domain. In some embodiments, the Cas9 domain is a nuclease inactive Cas9 (dCas9) domain, a Cas9 nickase (Cas9n) domain, or a nuclease active Cas9 domain. In some embodiments, the Cas9 domain is a nuclease inactive dCas9 domain. In some embodiments, the Cas9 domain is a Cas9 nickase (Cas9n) domain. In some embodiments, the Cas9 domain is a Cas9 domain from Streptococcus pyogenes (spCas9). In some embodiments, the Cas9 domain comprises an amino acid sequence that is at least about 70% identical, at least about 80% identical, at least about 90%, at least about 95%, at least about 98%, at least about 99%, at least about 99.5%, or at least about 99.9% identical to the amino acid sequence provided in any one of SEQ ID NOs: 10-260. In some embodiments, the Cas9 domain is a dCas9 domain that comprises a D10A and a H840A mutation in the amino acid sequence provided by SEQ ID NO: 10, or a corresponding mutation in any one of SEQ ID NOs: 11-260. In some embodiments, the dCas9 domain comprises the amino acid sequence of SEQ ID NO: 6. In some embodiments, the Cas9 domain is a Cas9n domain that comprises a D10A or a H840A mutation in the amino acid sequence provided by SEQ ID NO: 10, or a corresponding mutation in any one of SEQ ID NOs: 11-260. In some embodiments, the Cas9 domain is a Cas9n domain that comprises a D10A mutation in the amino acid sequence provided by SEQ ID NO: 10, or a corresponding mutation in any one of SEQ ID NOs: 11-260. In some embodiments, the Cas9 domain comprises the amino acid sequence of SEQ ID NO: 7.

[0186] In some embodiments, the nucleic acid editing domain comprises a deaminase, a nuclease, a nickase, a recombinase, a methyltransferase, a methylase, an acetylase, an acetyltransferase, a transcriptional activator, or a transcriptional repressor domain. In some embodiments, the nucleic acid editing domain comprises a deaminase domain. In some embodiments, the deaminase domain is selected from any of the deaminase domains provided herein. In some embodiments, the deaminase domain is a cytidine deaminase domain. In some embodiments, the cytidine deaminase domain comprises the amino acid sequence of any one of SEQ ID NOs: 350-389. In some embodiments, the cytidine deaminase domain is a deaminase domain from the apoplipoprotein B mRNA-editing complex (APOBEC) family. In some embodiments, the APOBEC family deaminase is selected from the group consisting of APOBEC1 deaminase, APOBEC2 deaminase, APOBEC3A deaminase, APOBEC3B deaminase, APOBEC3C deaminase, APOBEC3D deaminase, APOBEC3F deaminase, APOBEC3G deaminase, and APOBEC3H deaminase.

[0187] In some embodiments, the fusion protein comprises any of the fusion proteins provided herein. In some embodiments, the fusion protein comprises a Cas9 domain and a cytidine deaminase domain. In some embodiments, the Cas9 domain and the cytidine deaminase are linked via a linker. In some embodiments, the linker comprises the amino acid sequence of any one of SEQ ID NOs: 300-318. In some embodiments, the linker comprises the amino acid sequence SGSETPGTSESATPES (SEQ ID NO: 306). In some embodiments, the fusion protein comprises the amino acid sequence of any one of SEQ ID NOs: 540-542. In some embodiments, the fusion protein further comprises a uracil glycosylase inhibitor (UGI) domain. In some embodiments, the fusion protein comprises the amino acid sequence of any one of SEQ ID NOs: 543-550. In some embodiments, the fusion protein comprises the amino acid sequence of SEQ ID NO: 543. In some embodiments, the fusion protein comprises the amino acid sequence of SEQ ID NO: 544. In some embodiments, the fusion protein comprises a Cas9 domain and one or more adenosine deaminase domains. In some embodiments, one or more of the adenosine deaminase domains comprise the amino acid sequence of any one of SEQ ID NOs: 400-458. In some embodiments, the Cas9 domain and the adenosine deaminase are linked via a linker. In some embodiments, the linker comprises the amino acid sequence of any one of SEQ ID NOs: 300-318. In some embodiments, the fusion protein comprises the amino acid sequence of any one of SEQ ID NOs: 560-586. In some embodiments, the fusion protein further comprises a uracil glycosylase inhibitor (UGI) domain or a dISN domain.

[0188] In another aspect, provided herein are writing plasmids for use in eukaryotic cells comprising (i) a nucleic acid sequence encoding (a) a fusion protein comprising a nucleic acid programmable DNA binding protein (napDNAbp) and a nucleic acid editing domain and (b) a single guide RNA (sgRNA), wherein the nucleic acid sequence of (i) is operably linked to a promoter; and (ii) an origin of replication.

[0189] In some embodiments, the sgRNA associates with the napDNAbp under conditions (e.g., a stimulus or set of stimuli) that induce the expression of the sgRNA and expression of the fusion protein. In some embodiments, the sgRNA is complementary to a target sequence. In some embodiments, the writing plasmid does not encode an sgRNA. In some embodiments, the napDNAbp of the fusion protein encoded by the writing plasmid associates with a sgRNA expressed by the cell. In some embodiments, the napDNAbp associates with a sgRNA under conditions (e.g., a stimulus) that induce the expression of the fusion protein, wherein the sgRNA is expressed by the cell.

[0190] In some embodiments, the promoter is appropriate for use in a eukaryotic system. In some embodiments, the promoter is appropriate for use in a mammalian (e.g., human) system. In some embodiments, the promoter is induced by the presence of a stimulus. In some embodiments, the stimulus is a small molecule, a protein, a peptide, an amino acid, a metabolite, an inorganic molecule, an organometallic molecule, an organic molecule, a drug or drug candidate, a sugar, a lipid, a metal, a nucleic acid, a molecule produced during the activation of an endogenous or an exogenous signaling cascade, light, heat, sound, pressure, mechanical stress, shear stress, or a virus (e.g., phage) or other microorganism. In some embodiments, the stimulus is a phage. In some embodiments, the stimulus is light. In some embodiments, the stimulus is a small molecule. In some embodiments, the stimulus is a sugar. In some embodiments, the stimulus is an antibiotic. In some embodiments, the stimulus is a molecule produced during the activation of an endogenous or exogenous signing cascade. In some embodiments, the endogenous signaling cascade is the Wnt signaling cascade. In some embodiments, the molecule produced during the activation of the Wnt signaling cascade (i.e., the stimulus) is beta-catenin. In certain embodiments, the endogenous signaling cascade is, for example, an NF-κB, SMADs, STAT1, STAT2, STAT3, IRF-1, or E2F cascade. In some such embodiments, the stimulus is a cytokine or growth factor such as TNF, TGF-β, IL-6, IFNβ, IFNγ, or EGF. In some embodiments, the endogenous signaling cascade is, for example, a CREB, C/EBP, SRF, NFAT, GR, MAPK/JNK, GATA, RAR, RXR, VDR, ARE, or a XRE/DRE cascade. In certain such embodiments the stimulus is a small molecule such as forskolin, LiCl, PMA, dexamethasone, ATRA, calcitriol, sulforaphane, or TCDD. In some embodiments, the endogenous signaling cascade is an HSF, ATF6, or CBF/NF-Y/YY1 cascade. In some embodiments, the stimulus is anhydrotetracycline, IPTG, rhamnose, arabinose, tanespimycin, tunicamycin, or doxycycline. In some embodiments, the stimulus is doxycycline. In some embodiments, the promoter is an inducible promoter. In some embodiments, the inducible promoter is an inducible RNA polymerase III promoter, a tetracycline-inducible promoter, a light-inducible promoter, a heat-inducible promoter, a promoter induced by the presence of a virus, or a promoter induced by mechanical stress. In some embodiments, the inducible promoter is an tetracycline-inducible promoter. In some embodiments, the inducible RNA polymerase III promoter is an IPTG-inducible RNA polymerase III promoter or a tetracycline-inducible RNA polymerase III promoter. In some embodiments, the inducible promoter is selected from the inducible promoters shown in Table 8 or Table 10. In some embodiments, the promoter is a constitutive promoter. In some embodiments, the constitutive promoter is a constitutive cytomegalovirus (CMV) promoter, a constitutive RNA polymerase III promoter, or a UBC promoter. In some embodiments, the constitutive promoter is selected from the constitutive promoters shown in Table 8. In some embodiments, the constitutive or the inducible promoter comprises a P2A sequence. In some embodiments, the constitutive or the inducible RNA polymerase III promoter comprises a U6 promoter sequence or an H1 promoter sequence.

[0191] In some embodiments, the origin of replication (ORI) comprises a nucleic acid sequence suitable for use in a eukaryotic system. In some embodiments, the origin of replication (ORI) comprises a eukaryotic origin of replication sequence. In some embodiments, the origin of replication comprises a CloE1 origin of replication sequence. In some embodiments, the origin of replication sequence comprises an origin of replication sequence shown in Table 3.

[0192] In some embodiments, the napDNAbp is a napDNAbp capable of introducing a single-strand break. In some embodiments, the napDNAbp is a RNA-programmable DNA binding protein. In some embodiments, the RNA-programmable DNA binding protein comprises a Cas9 domain, a Cpf1 domain, a CasX domain, a CasY domain, a C2c1 domain, a C2c2 domain, or a C2c3 domain. In some embodiments, the RNA-programmable DNA binding protein comprises a Cas9 domain. In some embodiments, the Cas9 domain is a nuclease inactive Cas9 (dCas9) domain, a Cas9 nickase (Cas9n) domain, or a nuclease active Cas9 domain. In some embodiments, the Cas9 domain is a nuclease inactive dCas9 domain. In some embodiments, the Cas9 domain is a Cas9 nickase (Cas9n) domain. In some embodiments, the Cas9 domain is a Cas9 domain from Streptococcus pyogenes (spCas9). In some embodiments, the Cas9 domain comprises an amino acid sequence that is at least about 70% identical, at least about 80% identical, at least about 90%, at least about 95%, at least about 98%, at least about 99%, at least about 99.5%, or at least about 99.9% identical to the amino acid sequence provided in any one of SEQ ID NOs: 10-260. In some embodiments, the Cas9 domain is a dCas9 domain that comprises a D10A and a H840A mutation in the amino acid sequence provided by SEQ ID NO: 10, or a corresponding mutation in any one of SEQ ID NOs: 11-260. In some embodiments, the dCas9 domain comprises the amino acid sequence of SEQ ID NO: 6. In some embodiments, the Cas9 domain is a Cas9n domain that comprises a D10A or a H840A mutation in the amino acid sequence provided by SEQ ID NO: 10, or a corresponding mutation in any one of SEQ ID NOs: 11-260. In some embodiments, the Cas9 domain is a Cas9n domain that comprises a D10A mutation in the amino acid sequence provided by SEQ ID NO: 10, or a corresponding mutation in any one of SEQ ID NOs: 11-260. In some embodiments, the Cas9 domain comprises the amino acid sequence of SEQ ID NO: 7.

[0193] In some embodiments, the nucleic acid editing domain comprises a deaminase, a nuclease, a nickase, a recombinase, a methyltransferase, a methylase, an acetylase, an acetyltransferase, a transcriptional activator, or a transcriptional repressor domain. In some embodiments, the nucleic acid editing domain comprises a deaminase domain. In some embodiments, the deaminase domain is selected from any of the deaminase domains provided herein. In some embodiments, the deaminase domain is a cytidine deaminase domain. In some embodiments, the cytidine deaminase domain comprises the amino acid sequence of any one of SEQ ID NOs: 350-389. In some embodiments, the cytidine deaminase domain is a deaminase domain from the apoplipoprotein B mRNA-editing complex (APOBEC) family. In some embodiments, the APOBEC family deaminase is selected from the group consisting of APOBEC1 deaminase, APOBEC2 deaminase, APOBEC3A deaminase, APOBEC3B deaminase, APOBEC3C deaminase, APOBEC3D deaminase, APOBEC3F deaminase, APOBEC3G deaminase, and APOBEC3H deaminase.

[0194] In some embodiments, the fusion protein comprises any of the fusion proteins provided herein. In some embodiments, the fusion protein comprises a Cas9 domain and a cytidine deaminase domain. In some embodiments, the Cas9 domain and the cytidine deaminase are linked via a linker. In some embodiments, the linker comprises the amino acid sequence of any one of SEQ ID NOs: 300-318. In some embodiments, the linker comprises the amino acid sequence SGSETPGTSESATPES (SEQ ID NO: 306). In some embodiments, the fusion protein comprises the amino acid sequence of any one of SEQ ID NOs: 540-542. In some embodiments, the fusion protein further comprises a uracil glycosylase inhibitor (UGI) domain. In some embodiments, the fusion protein comprises the amino acid sequence of any one of SEQ ID NOs: 543-550. In some embodiments, the fusion protein comprises the amino acid sequence of SEQ ID NO: 543. In some embodiments, the fusion protein comprises the amino acid sequence of SEQ ID NO: 544. In some embodiments, the fusion protein comprises a Cas9 domain and one or more adenosine deaminase domains. In some embodiments, one or more of the adenosine deaminase domains comprise the amino acid sequence of any one of SEQ ID NOs: 400-458. In some embodiments, the Cas9 domain and the adenosine deaminase are linked via a linker. In some embodiments, the linker comprises the amino acid sequence of any one of SEQ ID NOs: 300-318. In some embodiments, the fusion protein comprises the amino acid sequence of any one of SEQ ID NOs: 560-586. In some embodiments, the fusion protein further comprises a uracil glycosylase inhibitor (UGI) domain or a dISN domain.

[0195] In yet another aspect, provided herein are writing plasmids for use in eukaryotic cells comprising (i) a nucleic acid sequence encoding a fusion protein comprising a nucleic acid programmable DNA binding protein (napDNAbp) and a nucleic acid editing domain operably linked to a first promoter; (ii) a nucleic acid sequence encoding a single guide RNA (sgRNA) operably linked to a second promoter; and (iii) an origin of replication.

[0196] In some embodiments, the sgRNA associates with the napDNAbp under conditions (e.g., a stimulus or set of stimuli) that induce the expression of the sgRNA and expression of the fusion protein. In some embodiments, the sgRNA is complementary to a target sequence. In some embodiments, the writing plasmid does not encode a sgRNA. In some embodiments, the napDNAbp encoded by the writing plasmid associates with a sgRNA expressed by a cell. In some embodiments, the napDNAbp associates with a sgRNA under conditions (e.g., a stimulus) that induce the expression of the fusion protein, wherein the sgRNA is expressed by a cell.

[0197] In some embodiments, at least one of the promoters is induced by the presence of a stimulus. In some embodiments, the stimulus is a small molecule, a protein, a peptide, an amino acid, a metabolite, an inorganic molecule, an organometallic molecule, an organic molecule, a drug or drug candidate, a sugar, a lipid, a metal, a nucleic acid, a molecule produced during the activation of an endogenous or an exogenous signaling cascade, light, heat, sound, pressure, mechanical stress, shear stress, or a virus (e.g., phage) or other microorganism. In some embodiments, the stimulus is a phage. In some embodiments, the stimulus is light. In some embodiments, the stimulus is a small molecule. In some embodiments, the stimulus is a sugar. In some embodiments, the stimulus is an antibiotic. In some embodiments, the stimulus is a molecule produced during the activation of an endogenous or an exogenous signaling cascade. In some embodiments, the stimulus is anhydrotetracycline, IPTG, rhamnose, arabinose, tanespimycin, tunicamycin, or doxycycline. In some embodiments, at least one of the promoters is an inducible promoter. In some embodiments, at least one of the promoters is a constitutive promoter. In some embodiments, the first promoter and the second promoter are different promoters. In some embodiments, the first promoter and the second promoter are different inducible promoters. In some embodiments, the first promoter and the second promoter are different constitutive promoters.

[0198] In some embodiments, the first promoter is appropriate for use in a eukaryotic system. In some embodiments, the promoter is appropriate for use in a mammalian (e.g., human) system. In some embodiments, the first promoter is induced by the presence of a stimulus. In some embodiments, the stimulus is a small molecule, a protein, a peptide, an amino acid, a metabolite, an inorganic molecule, an organometallic molecule, an organic molecule, a drug or drug candidate, a sugar, a lipid, a metal, a nucleic acid, a molecule produced during the activation of an endogenous or an exogenous signaling cascade, light, heat, sound, pressure, mechanical stress, shear stress, or a virus (e.g., phage) or other microorganism. In some embodiments, the stimulus is a phage. In some embodiments, the stimulus is light. In some embodiments, the stimulus is a small molecule. In some embodiments, the stimulus is a sugar. In some embodiments, the stimulus is an antibiotic. In some embodiments, the stimulus is a molecule produced during the activation of an endogenous or exogenous signing cascade. In some embodiments, the endogenous signaling cascade is the Wnt signaling cascade. In some embodiments, the molecule produced during the activation of the Wnt signaling cascade (i.e., the stimulus) is beta-catenin. In certain embodiments, the endogenous signaling cascade is, for example, an NF-κB, SMADs, STAT1, STAT2, STAT3, IRF-1, or E2F cascade. In some such embodiments, the stimulus is a cytokine or growth factor such as TNF, TGF-β, IL-6, IFNβ, IFNγ, or EGF. In some embodiments, the endogenous signaling cascade is, for example, a CREB, C/EBP, SRF, NFAT, GR, MAPK/JNK, GATA, RAR, RXR, VDR, ARE, or a XRE/DRE cascade. In certain such embodiments the stimulus is a small molecule such as forskolin, LiCl, PMA, dexamethasone, ATRA, calcitriol, sulforaphane, or TCDD. In some embodiments, the endogenous signaling cascade is an HSF, ATF6, or CBF/NF-Y/YY1 cascade. In some embodiments, the stimulus is anhydrotetracycline, IPTG, rhamnose, arabinose, tanespimycin, tunicamycin, or doxycycline. In some embodiments, the stimulus is doxycycline. In some embodiments, the first promoter is an inducible promoter. In some embodiments, the inducible promoter is an inducible RNA polymerase III promoter, a tetracycline-inducible promoter, a light-inducible promoter, a heat-inducible promoter, a promoter induced by the presence of a virus, or a promoter induced by mechanical stress. In some embodiments, the inducible promoter is an tetracycline-inducible promoter. In some embodiments, the inducible RNA polymerase III promoter is an IPTG-inducible RNA polymerase III promoter or a tetracycline-inducible RNA polymerase III promoter. In some embodiments, the inducible promoter is selected from the inducible promoters shown in Table 8 or Table 10. In some embodiments, the first promoter is a constitutive promoter. In some embodiments, the constitutive promoter is a constitutive cytomegalovirus (CMV) promoter, a constitutive RNA polymerase III promoter, or a UBC promoter. In some embodiments, the constitutive promoter is selected from the constitutive promoters shown in Table 8. In some embodiments, the constitutive or the inducible promoter comprises a P2A sequence. In some embodiments, the constitutive or the inducible RNA polymerase III promoter comprises a U6 promoter sequence or an H1 promoter sequence.

[0199] In some embodiments, the second promoter is appropriate for use in a eukaryotic system. In some embodiments, the promoter is appropriate for use in a mammalian (e.g., human) system. In some embodiments, the second promoter is induced by the presence of a stimulus. In some embodiments, the stimulus is a small molecule, a protein, a peptide, an amino acid, a metabolite, an inorganic molecule, an organometallic molecule, an organic molecule, a drug or drug candidate, a sugar, a lipid, a metal, a nucleic acid, a molecule produced during the activation of an endogenous or an exogenous signaling cascade, light, heat, sound, pressure, mechanical stress, shear stress, or a virus (e.g., phage) or other microorganism. In some embodiments, the stimulus is a phage. In some embodiments, the stimulus is light. In some embodiments, the stimulus is a small molecule. In some embodiments, the stimulus is a sugar. In some embodiments, the stimulus is an antibiotic. In some embodiments, the stimulus is a molecule produced during the activation of an endogenous or exogenous signing cascade. In some embodiments, the endogenous signaling cascade is the Wnt signaling cascade. In some embodiments, the molecule produced during the activation of the Wnt signaling cascade (i.e., the stimulus) is beta-catenin. In certain embodiments, the endogenous signaling cascade is, for example, an NF-κB, SMADs, STAT1, STAT2, STAT3, IRF-1, or E2F cascade. In some such embodiments, the stimulus is a cytokine or growth factor such as TNF, TGF-β, IL-6, IFNβ, IFNγ, or EGF. In some embodiments, the endogenous signaling cascade is, for example, a CREB, C/EBP, SRF, NFAT, GR, MAPK/JNK, GATA, RAR, RXR, VDR, ARE, or a XRE/DRE cascade. In certain such embodiments the stimulus is a small molecule such as forskolin, LiCl, PMA, dexamethasone, ATRA, calcitriol, sulforaphane, or TCDD. In some embodiments, the endogenous signaling cascade is an HSF, ATF6, or CBF/NF-Y/YY1 cascade. In some embodiments, the stimulus is anhydrotetracycline, IPTG, rhamnose, arabinose, tanespimycin, tunicamycin, or doxycycline. In some embodiments, the stimulus is doxycycline. In some embodiments, the second promoter is an inducible promoter. In some embodiments, the inducible promoter is an inducible RNA polymerase III promoter, a tetracycline-inducible promoter, a light-inducible promoter, a heat-inducible promoter, a promoter induced by the presence of a virus, or a promoter induced by mechanical stress. In some embodiments, the inducible promoter is an tetracycline-inducible promoter. In some embodiments, the inducible RNA polymerase III promoter is an IPTG-inducible RNA polymerase III promoter or a tetracycline-inducible RNA polymerase III promoter. In some embodiments, the inducible promoter is selected from the inducible promoters shown in Table 8 or Table 10. In some embodiments, the second promoter is a constitutive promoter. In some embodiments, the constitutive promoter is a constitutive cytomegalovirus (CMV) promoter, a constitutive RNA polymerase III promoter, or a UBC promoter. In some embodiments, the constitutive promoter is selected from the constitutive promoters shown in Table 8. In some embodiments, the constitutive or the inducible promoter comprises a P2A sequence. In some embodiments, the constitutive or the inducible RNA polymerase III promoter comprises a U6 promoter sequence or an H1 promoter sequence.

[0200] In some embodiments, the origin of replication (ORI) comprises a nucleic acid sequence suitable for use in a eukaryotic system. In some embodiments, the origin of replication (ORI) comprises a eukaryotic origin of replication sequence. In some embodiments, the origin of replication comprises a CloE1 origin of replication sequence. In some embodiments, the origin of replication sequence comprises an origin of replication sequence shown in Table 3.

[0201] In some embodiments, the writing plasmid comprises: (i) a nucleic acid sequence encoding a fusion protein comprising a napDNAbp and a nucleic acid editing domain operably linked to a constitutive promoter, (ii) a nucleic acid encoding a sgRNA operably liked to an inducible promoter, wherein the sgRNA is complementary to a target sequence, and (iii) an origin of replication. In some embodiments, the fusion protein is constitutively expressed and the napDNAbp associates with the sgRNA under conditions (e.g., a stimulus or set of stimuli) that induce the expression of the sgRNA.

[0202] In some embodiments, the writing plasmid comprises: (i) a nucleic acid sequence encoding a fusion protein comprising a napDNAbp and a nucleic acid editing domain operably linked to an inducible promoter, (ii) a nucleic acid encoding a sgRNA operably liked to a constitutive promoter, wherein the sgRNA is complementary to a target sequence, and (iii) an origin of replication. In some embodiments, the sgRNA is constitutively expressed and associates with the napDNAbp under conditions (e.g., a stimulus or set of stimuli) that induce the expression of the fusion protein. In some embodiments, the inducible promoter is a tetracycline-inducible promoter. In some embodiments, the stimulus that induces the expression of the fusion protein is doxycycline. In some embodiments, the constitutive promoter is a constitutive U6 promoter.

[0203] In some embodiments, the writing plasmid comprises: (i) a nucleic acid sequence encoding a fusion protein comprising a napDNAbp and a nucleic acid editing domain operably linked to an inducible promoter, (ii) a nucleic acid encoding a sgRNA operably liked to a constitutive promoter, wherein the sgRNA is complementary to a target sequence, and (iii) an origin of replication. In some embodiments, the sgRNA is constitutively expressed and associates with the napDNAbp under conditions (e.g., a stimulus or set of stimuli) that induce the expression of the fusion protein. In some embodiments, the inducible promoter is induced by a signaling molecule produced during the activation of an endogenous or an exogenous signaling cascade. In some embodiments, the endogenous signaling cascade is the Wnt signaling cascade. In some embodiments, the signaling molecule produced during an activated Wnt signaling cascade is beta-catenin. In some embodiments, the stimulus that induces the expression of the fusion protein is beta-catenin. In certain embodiments, the endogenous signaling cascade is, for example, an NF-κB, SMADs, STAT1, STAT2, STAT3, IRF-1, or E2F cascade. In some such embodiments, the stimulus is a cytokine or growth factor such as TNF, TGF-β, IL-6, IFNβ, IFNγ, or EGF. In some embodiments, the endogenous signaling cascade is, for example, a CREB, C/EBP, SRF, NFAT, GR, MAPK/JNK, GATA, RAR, RXR, VDR, ARE, or a XRE/DRE cascade. In certain such embodiments the stimulus is a small molecule such as forskolin, LiCl, PMA, dexamethasone, ATRA, calcitriol, sulforaphane, or TCDD. In some embodiments, the endogenous signaling cascade is an HSF, ATF6, or CBF/NF-Y/YY1 cascade. In some embodiments, the stimulus is anhydrotetracycline, IPTG, rhamnose, arabinose, tanespimycin, tunicamycin, or doxycycline. In some embodiments, the constitutive promoter is a constitutive U6 promoter. In some embodiments, the nucleic acid sequence of (i) or (ii) further comprises a nucleic acid sequence encoding a second protein. In some embodiments, the nucleic acid sequence of (i) further comprises a nucleic acid sequence encoding a second protein. In some embodiments, the second protein is luciferase. In some embodiments, the nucleic acid sequence encoding the reporter protein is connected to the 3′ end of the nucleic acid sequence of (i) by an intervening P2A sequence.

[0204] In some embodiments, the napDNAbp is a napDNAbp capable of introducing a single-strand break. In some embodiments, the napDNAbp is a RNA-programmable DNA binding protein. In some embodiments, the RNA-programmable DNA binding protein comprises a Cas9 domain, a Cpf1 domain, a CasX domain, a CasY domain, a C2c1 domain, a C2c2 domain, or a C2c3 domain. In some embodiments, the RNA-programmable DNA binding protein comprises a Cas9 domain. In some embodiments, the Cas9 domain is a nuclease inactive Cas9 (dCas9) domain, a Cas9 nickase (Cas9n) domain, or a nuclease active Cas9 domain. In some embodiments, the Cas9 domain is a nuclease inactive dCas9 domain. In some embodiments, the Cas9 domain is a Cas9 nickase (Cas9n) domain. In some embodiments, the Cas9 domain is a Cas9 domain from Streptococcus pyogenes (spCas9). In some embodiments, the Cas9 domain comprises an amino acid sequence that is at least about 70% identical, at least about 80% identical, at least about 90%, at least about 95%, at least about 98%, at least about 99%, at least about 99.5%, or at least about 99.9% identical to the amino acid sequence provided in any one of SEQ ID NOs: 10-260. In some embodiments, the Cas9 domain is a dCas9 domain that comprises a D10A and a H840A mutation in the amino acid sequence provided by SEQ ID NO: 10, or a corresponding mutation in any one of SEQ ID NOs: 11-260. In some embodiments, the dCas9 domain comprises the amino acid sequence of SEQ ID NO: 6. In some embodiments, the Cas9 domain is a Cas9n domain that comprises a D10A or a H840A mutation in the amino acid sequence provided by SEQ ID NO: 10, or a corresponding mutation in any one of SEQ ID NOs: 11-260. In some embodiments, the Cas9 domain is a Cas9n domain that comprises a D10A mutation in the amino acid sequence provided by SEQ ID NO: 10, or a corresponding mutation in any one of SEQ ID NOs: 11-260. In some embodiments, the Cas9 domain comprises the amino acid sequence of SEQ ID NO: 7.

[0205] In some embodiments, the nucleic acid editing domain comprises a deaminase, a nuclease, a nickase, a recombinase, a methyltransferase, a methylase, an acetylase, an acetyltransferase, a transcriptional activator, or a transcriptional repressor domain. In some embodiments, the nucleic acid editing domain comprises a deaminase domain. In some embodiments, the deaminase domain is selected from any of the deaminase domains provided herein. In some embodiments, the deaminase domain is a cytidine deaminase domain. In some embodiments, the cytidine deaminase domain comprises the amino acid sequence of any one of SEQ ID NOs: 350-389. In some embodiments, the cytidine deaminase domain is a deaminase domain from the apoplipoprotein B mRNA-editing complex (APOBEC) family. In some embodiments, the APOBEC family deaminase is selected from the group consisting of APOBEC1 deaminase, APOBEC2 deaminase, APOBEC3A deaminase, APOBEC3B deaminase, APOBEC3C deaminase, APOBEC3D deaminase, APOBEC3F deaminase, APOBEC3G deaminase, and APOBEC3H deaminase.

[0206] In some embodiments, the fusion protein comprises any of the fusion proteins provided herein. In some embodiments, the fusion protein comprises a Cas9 domain and a cytidine deaminase domain. In some embodiments, the Cas9 domain and the cytidine deaminase are linked via a linker. In some embodiments, the linker comprises the amino acid sequence of any one of SEQ ID NOs: 300-318. In some embodiments, the linker comprises the amino acid sequence SGSETPGTSESATPES (SEQ ID NO: 306). In some embodiments, the fusion protein comprises the amino acid sequence of any one of SEQ ID NOs: 540-542. In some embodiments, the fusion protein further comprises a uracil glycosylase inhibitor (UGI) domain. In some embodiments, the fusion protein comprises the amino acid sequence of any one of SEQ ID NOs: 543-550. In some embodiments, the fusion protein comprises the amino acid sequence of SEQ ID NO: 543. In some embodiments, the fusion protein comprises the amino acid sequence of SEQ ID NO: 544. In some embodiments, the fusion protein comprises a Cas9 domain and one or more adenosine deaminase domains. In some embodiments, one or more of the adenosine deaminase domains comprise the amino acid sequence of any one of SEQ ID NOs: 400-458. In some embodiments, the Cas9 domain and the adenosine deaminase are linked via a linker. In some embodiments, the linker comprises the amino acid sequence of any one of SEQ ID NOs: 300-318. In some embodiments, the fusion protein comprises the amino acid sequence of any one of SEQ ID NOs: 560-586. In some embodiments, the fusion protein further comprises a uracil glycosylase inhibitor (UGI) domain or a dISN domain.

[0207] Some aspects of the present disclosure provide a writing plasmid for use with one or more additional plasmids (e.g., accessory plasmids) that employ both an inducible promoter and a repressor system for control of the expression of one or more components of the writing plasmid (e.g., napDNAbp, fusion protein, sgRNA). Without wishing to be bound by any particular theory, this combination of repressors and inducible promoters can allow for the recording of multiple inputs (e.g., stimuli) in an order-dependent manner.

[0208] Thus, in one aspect, provided herein are writing plasmids for use in a eukaryotic cell comprising: (i) a nucleic acid sequence encoding a fusion protein comprising a nucleic acid programmable DNA binding protein (napDNAbp) and a nucleic acid editing domain operably linked to a promoter; and (ii) an origin of replication.

[0209] In some embodiments, the writing plasmid does not encode a sgRNA. In some embodiments, the napDNAbp of the fusion protein encoded by the writing plasmid associates with a sgRNA expressed by a cell. In some embodiments, the napDNAbp of the fusion protein associates with a sgRNA under conditions (e.g., a stimulus) that induce the expression of the fusion protein, wherein the sgRNA is expressed by a cell. In some embodiments, the sgRNA is complementary to a target sequence.

[0210] In some embodiments, the promoter is appropriate for use in a eukaryotic system. In some embodiments, the promoter is appropriate for use in a mammalian (e.g., human) system. In some embodiments, the promoter is induced by the presence of a stimulus. In some embodiments, the stimulus is a small molecule, a protein, a peptide, an amino acid, a metabolite, an inorganic molecule, an organometallic molecule, an organic molecule, a drug or drug candidate, a sugar, a lipid, a metal, a nucleic acid, a molecule produced during the activation of an endogenous or an exogenous signaling cascade, light, heat, sound, pressure, mechanical stress, shear stress, or a virus (e.g., phage) or other microorganism. In some embodiments, the stimulus is a phage. In some embodiments, the stimulus is light. In some embodiments, the stimulus is a small molecule. In some embodiments, the stimulus is a sugar. In some embodiments, the stimulus is an antibiotic. In some embodiments, the stimulus is a molecule produced during the activation of an endogenous or exogenous signing pathway. In some embodiments, the endogenous signaling cascade is the Wnt signaling cascade. In some embodiments, the molecule produced during the activation of the Wnt signaling cascade (i.e., the stimulus) is beta-catenin. In certain embodiments, the signaling cascade is, for example, an NF-κB, SMADs, STAT1, STAT2, STAT3, IRF-1, or E2F cascade. In some such embodiments, the stimulus is a cytokine or growth factor such as TNF, TGF-β, IL-6, IFNβ, IFNγ, or EGF. In some embodiments, the signaling cascade is, for example, a CREB, C/EBP, SRF, NFAT, GR, MAPK/JNK, GATA, RAR, RXR, VDR, ARE, or a XRE/DRE cascade. In certain such embodiments the stimulus is a small molecule such as forskolin, LiCl, PMA, dexamethasone, ATRA, calcitriol, sulforaphane, or TCDD. In some embodiments, the signaling cascade is an HSF, ATF6, or CBF/NF-Y/YY1 cascade. In some embodiments, the stimulus is anhydrotetracycline, IPTG, rhamnose, arabinose, tanespimycin, tunicamycin, or doxycycline. In some embodiments, the stimulus is doxycycline. In some embodiments, the promoter is an inducible promoter. In some embodiments, the inducible promoter is an inducible RNA polymerase III promoter, a tetracycline-inducible promoter, a light-inducible promoter, a heat-inducible promoter, a promoter induced by the presence of a virus, or a promoter induced by mechanical stress. In some embodiments, the inducible promoter is an tetracycline-inducible promoter. In some embodiments, the inducible RNA polymerase III promoter is an IPTG-inducible RNA polymerase III promoter or a tetracycline-inducible RNA polymerase III promoter. In some embodiments, the inducible promoter is selected from the inducible promoters shown in Table 8 or Table 10. In some embodiments, the promoter is a constitutive promoter. In some embodiments, the constitutive promoter is a constitutive cytomegalovirus (CMV) promoter, a constitutive RNA polymerase III promoter, or a UBC promoter. In some embodiments, the constitutive promoter is selected from the constitutive promoters shown in Table 8 or Table 10. In some embodiments, the constitutive or the inducible promoter comprises a P2A sequence. In some embodiments, the constitutive or the inducible RNA polymerase III promoter comprises a U6 promoter sequence or an H1 promoter sequence.

[0211] In some embodiments, the origin of replication (ORI) comprises a nucleic acid sequence suitable for use in a eukaryotic system. In some embodiments, the origin of replication (ORI) comprises a eukaryotic origin of replication sequence. In some embodiments, the origin of replication comprises a CloE1 origin of replication sequence. In some embodiments, the origin of replication sequence comprises an origin of replication sequence shown in Table 3.

[0212] In some embodiments, the writing plasmid is used in combination with one or more additional plasmids. In some embodiments, the writing plasmid is used in combination with (i) a second plasmid comprising a nucleic acid sequence encoding a sgRNA operably linked to a constitutive promoter comprising a repressor binding site, wherein the sgRNA is complementary to a target sequence; and (ii) a third plasmid comprising a nucleic acid sequence encoding one or more repressor proteins operably linked to a second constitutive promoter. In some embodiments, the repressor protein and sgRNA are constitutively expressed, and the repressor protein binds to the repressor binding site of the constitutive promoter. In some embodiments, the nucleic acid sequence of (ii) encodes one repressor protein. In some embodiments, the repressor protein is a tetracycline repressor protein (Tet_{R}) or a lactose repressor protein (LacI). In some embodiments, the nucleic acid sequence of (ii) encodes a first repressor protein and a second repressor protein, wherein an intervening P2A sequence separates the nucleic acid sequences encoding the first and second repressor proteins. In some embodiments, the first repressor protein or the second repressor protein is a tetracycline repressor protein (Tet_{R}). In some embodiments, the first repressor protein or the second repressor protein is a lactose repressor protein (LacI). In some embodiments, the first repressor protein and the second repressor protein are not the same. In some embodiments, the first repressor protein is a lactose repressor protein (LacI). In some embodiments, the lactose repressor protein cannot bind to the first repressor binding site in the presence of IPTG. In some embodiments, the second repressor protein is a tetracycline repressor protein (Tet_{R}). In some embodiments, the tetracycline repressor protein cannot bind to the second repressor binding site in the presence of tetracycline, or a derivative thereof. In some embodiments, the tetracycline, or derivative thereof, is doxycylcline. In some embodiments, the writing plasmid is used in combination with a fourth plasmid comprising a nucleic acid encoding a second sgRNA operably linked to a third constitutive promoter comprising a second repressor binding site, wherein the second sgRNA is complementary to a target sequence, wherein the second repressor protein and the second sgRNA are constitutively expressed, and wherein the second repressor protein binds to the second repressor binding site of the third constitutive promoter. In some embodiments, the first constitutive promoter, the second constitutive promoter, and the third constitutive promoter are selected from a CMV promoter, a U6 promoter, a H1 promoter, or a UBC promoter. In some embodiments, the first constitutive promoter, the second constitutive promoter, and the third constitutive promoter are selected from a constitutive promoter listed in Table 8. In some embodiments, the first constitutive promoter, the second constitutive promoter, and the third constitutive promoter are different constitutive promoters. In some embodiments, the first constitutive promoter is a U6 promoter. In some embodiments, the second constitutive promoter is a UBC promoter. In some embodiments, the third constitutive promoter is a H1 promoter.

[0213] In some embodiments, the napDNAbp is a napDNAbp capable of introducing a single-strand break. In some embodiments, the napDNAbp is a RNA-programmable DNA binding protein. In some embodiments, the RNA-programmable DNA binding protein comprises a Cas9 domain, a Cpf1 domain, a CasX domain, a CasY domain, a C2c1 domain, a C2c2 domain, or a C2c3 domain. In some embodiments, the RNA-programmable DNA binding protein comprises a Cas9 domain. In some embodiments, the Cas9 domain is a nuclease inactive Cas9 (dCas9) domain, a Cas9 nickase (Cas9n) domain, or a nuclease active Cas9 domain. In some embodiments, the Cas9 domain is a nuclease inactive dCas9 domain. In some embodiments, the Cas9 domain is a Cas9 nickase (Cas9n) domain. In some embodiments, the Cas9 domain is a Cas9 domain from Streptococcus pyogenes (spCas9). In some embodiments, the Cas9 domain comprises an amino acid sequence that is at least about 70% identical, at least about 80% identical, at least about 90%, at least about 95%, at least about 98%, at least about 99%, at least about 99.5%, or at least about 99.9% identical to the amino acid sequence provided in any one of SEQ ID NOs: 10-260. In some embodiments, the Cas9 domain is a dCas9 domain that comprises a D10A and a H840A mutation in the amino acid sequence provided by SEQ ID NO: 10, or a corresponding mutation in any one of SEQ ID NOs: 11-260. In some embodiments, the dCas9 domain comprises the amino acid sequence of SEQ ID NO: 6. In some embodiments, the Cas9 domain is a Cas9n domain that comprises a D10A or a H840A mutation in the amino acid sequence provided by SEQ ID NO: 10, or a corresponding mutation in any one of SEQ ID NOs: 11-260. In some embodiments, the Cas9 domain is a Cas9n domain that comprises a D10A mutation in the amino acid sequence provided by SEQ ID NO: 10, or a corresponding mutation in any one of SEQ ID NOs: 11-260. In some embodiments, the Cas9 domain comprises the amino acid sequence of SEQ ID NO: 7.

[0214] In some embodiments, the nucleic acid editing domain comprises a deaminase, a nuclease, a nickase, a recombinase, a methyltransferase, a methylase, an acetylase, an acetyltransferase, a transcriptional activator, or a transcriptional repressor domain. In some embodiments, the nucleic acid editing domain comprises a deaminase domain. In some embodiments, the deaminase domain is selected from any of the deaminase domains provided herein. In some embodiments, the deaminase domain is a cytidine deaminase domain. In some embodiments, the cytidine deaminase domain comprises the amino acid sequence of any one of SEQ ID NOs: 350-389. In some embodiments, the cytidine deaminase domain is a deaminase domain from the apoplipoprotein B mRNA-editing complex (APOBEC) family. In some embodiments, the APOBEC family deaminase is selected from the group consisting of APOBEC1 deaminase, APOBEC2 deaminase, APOBEC3A deaminase, APOBEC3B deaminase, APOBEC3C deaminase, APOBEC3D deaminase, APOBEC3F deaminase, APOBEC3G deaminase, and APOBEC3H deaminase.

[0215] In some embodiments, the fusion protein comprises any of the fusion proteins provided herein. In some embodiments, the fusion protein comprises a Cas9 domain and a cytidine deaminase domain. In some embodiments, the Cas9 domain and the cytidine deaminase are linked via a linker. In some embodiments, the linker comprises the amino acid sequence of any one of SEQ ID NOs: 300-318. In some embodiments, the linker comprises the amino acid sequence SGSETPGTSESATPES (SEQ ID NO: 306). In some embodiments, the fusion protein comprises the amino acid sequence of any one of SEQ ID NOs: 540-542. In some embodiments, the fusion protein further comprises a uracil glycosylase inhibitor (UGI) domain. In some embodiments, the fusion protein comprises the amino acid sequence of any one of SEQ ID NOs: 543-550. In some embodiments, the fusion protein comprises the amino acid sequence of SEQ ID NO: 543. In some embodiments, the fusion protein comprises the amino acid sequence of SEQ ID NO: 544. In some embodiments, the fusion protein comprises a Cas9 domain and one or more adenosine deaminase domains. In some embodiments, one or more of the adenosine deaminase domains comprise the amino acid sequence of any one of SEQ ID NOs: 400-458. In some embodiments, the Cas9 domain and the adenosine deaminase are linked via a linker. In some embodiments, the linker comprises the amino acid sequence of any one of SEQ ID NOs: 300-318. In some embodiments, the fusion protein comprises the amino acid sequence of any one of SEQ ID NOs: 560-586. In some embodiments, the fusion protein further comprises a uracil glycosylase inhibitor (UGI) domain or a dISN domain.

[0216] One of ordinary skill in the art will recognize based on this disclosure and knowledge in the field that additional promoters operably linked to additional sgRNA sequences, or additional fusion proteins (e.g., comprising an orthogonal napDNAbp, such as an orthogonal Cas9 domain) operably linked to additional promoters, can be included in each of the writing plasmids for use in a eukaryotic system (e.g., a eukaryotic cell) described above, and thus the disclosure in not limited in that regard. In some embodiments, the eukaryotic system is a mammalian system (e.g., a mammalian cell). In some embodiments, the mammalian system is a human system (e.g., a human cell).

### Integrated Writing Systems

[0217] In one aspect, the present disclosure provides integrated writing systems comprising one or more writing loci comprising a nucleic acid sequence encoding a nucleic acid programmable DNA binding protein (napDNAbp) operably linked to a promoter. This napDNAbp may be a nuclease active napDNAbp (e.g., a nuclease active Cas9 domain) or a nuclease inactive napDNAbp (e.g., a dCas9 domain or a Cas9n domain). Without wishing to be bound by any particular theory, the components of the integrated writing system (e.g., napDNAbp) are generally operably linked to a promoter sequence which controls the expression of each component. In some embodiments, the components of the integrated writing system (e.g., napDNAbp) are operably linked to a single inducible promoter, such that the presence of the stimulus (e.g., a small molecule, a protein, a peptide, an amino acid, a metabolite, an inorganic molecule, an organometallic molecule, an organic molecule, a drug or drug candidate, a sugar, a lipid, a metal, a nucleic acid, a molecule produced during the activation of an endogenous or an exogenous signaling cascade, light, heat, sound, pressure, mechanical stress, shear stress, or a virus (e.g., phage) or other microorganism, etc.) induces expression of all the components of the writing locus simultaneously. In some embodiments, one or more of the components of the integrated writing system (e.g., napDNAbp) are operably linked to a constitutively active promoter, such that the component is constitutively expressed in cells. In some embodiments, each component of the integrated writing system (e.g., napDNAbp) is operably linked to a different inducible promoter, where expression of each component is only initiated in the presence of the correct set of stimuli (e.g., a small molecule, a protein, a peptide, an amino acid, a metabolite, an inorganic molecule, an organometallic molecule, an organic molecule, a drug or drug candidate, a sugar, a lipid, a metal, a nucleic acid, a molecule produced during the activation of an endogenous or an exogenous signaling cascade, light, heat, sound, pressure, mechanical stress, shear stress, or a virus (e.g., phage) or other microorganism, etc). The use of multiple different inducible promoters operably linked to separate components of the integrated writing system allows for the generation of cell data recorders that recapitulate an “AND” Boolean logic gate, where signal output (e.g., DNA double-strand breaks) is only recorded in the presence of all required stimuli, but not in the presence of only one stimulus.

[0218] In certain aspects, provided herein are integrated writing systems for use in eukaryotic cells comprising a writing locus comprising a nucleic acid sequence encoding a fusion protein comprising a nucleic acid programmable DNA binding protein (napDNAbp) and a nucleic acid editing domain operably linked to a promoter.

[0219] In some embodiments, the writing locus does not encode a sgRNA. In some embodiments, the napDNAbp of the fusion protein encoded by the writing locus associates with a sgRNA expressed by a cell (e.g., from a separate locus). In some embodiments, the napDNAbp of the fusion protein associates with a sgRNA under conditions (e.g., a stimulus) that induce the expression of the fusion protein, wherein the sgRNA is expressed by a cell. In some embodiments, the sgRNA is complementary to a target sequence.

[0220] In some embodiments, the promoter is appropriate for use in a eukaryotic system. In some embodiments, the promoter is appropriate for use in a mammalian (e.g., human) system. In some embodiments, the promoter is induced by the presence of a stimulus. In some embodiments, the stimulus is a small molecule, a protein, a peptide, an amino acid, a metabolite, an inorganic molecule, an organometallic molecule, an organic molecule, a drug or drug candidate, a sugar, a lipid, a metal, a nucleic acid, a molecule produced during the activation of an endogenous or an exogenous signaling cascade, light, heat, sound, pressure, mechanical stress, shear stress, or a virus (e.g., phage) or other microorganism. In some embodiments, the stimulus is a phage. In some embodiments, the stimulus is light. In some embodiments, the stimulus is a small molecule. In some embodiments, the stimulus is a sugar. In some embodiments, the stimulus is an antibiotic. In some embodiments, the stimulus is a molecule produced during the activation of an endogenous or exogenous signaling pathway. In some embodiments, the endogenous signaling cascade is the Wnt signaling cascade. In some embodiments, the molecule produced during the activation of the Wnt signaling cascade (i.e., the stimulus) is beta-catenin. In certain embodiments, the endogenous signaling cascade is, for example, an NF-κB, SMADs, Signal Transducer and Activator of Transcription 1 (STAT1), STAT2, STAT3, interferon regulatory factor-1 (IRF-1), or E2F cascade. In some such embodiments, the stimulus is a cytokine or growth factor such as Tumor Necrosis Factor (TNF), Transforming Growth Factor β (TGF-β), Interleukin 6 (IL-6), Interferon β (IFNβ), IFNγ, or Epidermal Growth Factor (EGF). In some embodiments, the endogenous signaling cascade is, for example, a cAMP Response Element-Binding protein (CREB), CCAAT-Enhancer-Binding protein (C/EBP), Serum Response Factor (SRF), Nuclear Factor of Activated T-cells (NFAT), Glucocorticoid Receptor (GR), Mitogen Activated Protein Kinase/c-Jun N-terminal Kinase (MAPK/JNK), GATA transcription factor (GATA), Retinoic Acid Receptor (RAR), Retinoid X Receptor (RXR), Vitamin D Receptor (VDR), Adenylate-Uridylate element (ARE), or a Xenobiotic/Dioxin-Responsive Element (XRE/DRE) cascade. In certain such embodiments the stimulus is a small molecule such as forskolin, lithium chloride (LiCl), phorbol 12-myristate 13-acetate (PMA), dexamethasone, all-trans retinoic acid (ATRA), calcitriol, sulforaphane, or 2,3,7,8-tetrachlorodibenzodioxin (TCDD). In some embodiments, the endogenous signaling cascade is a Heat Shock Factor (HSF), Activating Transcription Factor 6 (ATF6), or CCAAT-binding Factor/Nuclear Transcription Factor Y/Transcriptional Factor Yin Yang 1 (CBF/NF-Y/YY1) cascade. In some embodiments, the stimulus is anhydrotetracycline, IPTG, rhamnose, arabinose, tanespimycin, tunicamycin, or doxycycline. In some embodiments, the stimulus is doxycycline. In some embodiments, the promoter is an inducible promoter. In some embodiments, the inducible promoter is an inducible RNA polymerase III promoter, a tetracycline-inducible promoter, a light-inducible promoter, a heat-inducible promoter, a promoter induced by the presence of a virus, or a promoter induced by mechanical stress. In some embodiments, the inducible promoter is an tetracycline-inducible promoter. In some embodiments, the inducible RNA polymerase III promoter is an IPTG-inducible RNA polymerase III promoter or a tetracycline-inducible RNA polymerase III promoter. In some embodiments, the inducible promoter is selected from the inducible promoters shown in Table 8 or Table 10. In some embodiments, the promoter is a constitutive promoter. In some embodiments, the constitutive promoter is a constitutive cytomegalovirus (CMV) promoter, a constitutive RNA polymerase III promoter, or a UBC promoter. In some embodiments, the constitutive promoter is selected from the constitutive promoters shown in Table 8. In some embodiments, the constitutive or the inducible promoter comprises a P2A sequence. In some embodiments, the constitutive or the inducible RNA polymerase III promoter comprises a U6 promoter sequence or an H1 promoter sequence.

[0221] In some embodiments, the writing locus comprises a nucleic acid sequence encoding a fusion protein comprising a napDNAbp and a nucleic acid editing domain operably linked to a first constitutive promoter. In some embodiments, the fusion protein is constitutively expressed. In some embodiments, this writing locus is used in combination with a second locus comprising a nucleic acid encoding a first sgRNA operably liked to a second constitutive promoter, wherein the first sgRNA is complementary to a first target sequence. In some embodiments, the fusion protein and the first sgRNA are constitutively expressed, and the first sgRNA associates with the napDNAbp. In some embodiments, this writing locus is used in combination with a third locus comprising a nucleic acid encoding a second sgRNA operably liked to a third constitutive promoter, wherein the second sgRNA is complementary to a second target sequence. In some embodiments, the fusion protein and the second sgRNA are constitutively expressed, and the second sgRNA associates with the napDNAbp. In some embodiments, this writing locus is used in combination with a fourth locus comprising a nucleic acid encoding a third sgRNA operably liked to a fourth constitutive promoter, wherein the third sgRNA is complementary to a third target sequence. In some embodiments, the fusion protein and the third sgRNA are constitutively expressed, and the third sgRNA associates with the napDNAbp. In some embodiments, the first, second, and third sgRNAs are not identical. In some embodiments, the first, second, and third sgRNAs are each independently complementary to a different target sequence. In some embodiments, any one of the first, second, third, and/or fourth constitutive promoter is selected from the constitutive promoters listed in Table 8. In some embodiments, the first constitutive promoter is a CMV promoter. In some embodiments, the second, third, and/or fourth constitutive promoters are different. In some embodiments, the second, third, and/or fourth constitutive promoters are the same. In some embodiments, the second, third, and/or fourth constitutive promoter comprises a U6 promoter sequence. In some embodiments, any one of the first, second, third, and/or fourth promoters can be an inducible promoter. In some embodiments, the inducible promoter is selected from a inducible promoter listed in Table 8 or Table 10.

[0222] In some embodiments, the napDNAbp is a napDNAbp capable of introducing a single-strand break. In some embodiments, the napDNAbp is a RNA-programmable DNA binding protein. In some embodiments, the RNA-programmable DNA binding protein comprises a Cas9 domain, a Cpf1 domain, a CasX domain, a CasY domain, a C2c1 domain, a C2c2 domain, or a C2c3 domain. In some embodiments, the RNA-programmable DNA binding protein comprises a Cas9 domain. In some embodiments, the Cas9 domain is a nuclease inactive Cas9 (dCas9) domain, a Cas9 nickase (Cas9n) domain, or a nuclease active Cas9 domain. In some embodiments, the Cas9 domain is a nuclease inactive dCas9 domain. In some embodiments, the Cas9 domain is a Cas9 nickase (Cas9n) domain. In some embodiments, the Cas9 domain is a Cas9 domain from Streptococcus pyogenes (spCas9). In some embodiments, the Cas9 domain comprises an amino acid sequence that is at least about 70% identical, at least about 80% identical, at least about 90%, at least about 95%, at least about 98%, at least about 99%, at least about 99.5%, or at least about 99.9% identical to the amino acid sequence provided in any one of SEQ ID NOs: 10-260. In some embodiments, the Cas9 domain is a dCas9 domain that comprises a D10A and a H840A mutation in the amino acid sequence provided by SEQ ID NO: 10, or a corresponding mutation in any one of SEQ ID NOs: 11-260. In some embodiments, the dCas9 domain comprises the amino acid sequence of SEQ ID NO: 6. In some embodiments, the Cas9 domain is a Cas9n domain that comprises a D10A or a H840A mutation in the amino acid sequence provided by SEQ ID NO: 10, or a corresponding mutation in any one of SEQ ID NOs: 11-260. In some embodiments, the Cas9 domain is a Cas9n domain that comprises a D10A mutation in the amino acid sequence provided by SEQ ID NO: 10, or a corresponding mutation in any one of SEQ ID NOs: 11-260. In some embodiments, the Cas9 domain comprises the amino acid sequence of SEQ ID NO: 7.

[0223] In some embodiments, the nucleic acid editing domain comprises a deaminase, a nuclease, a nickase, a recombinase, a methyltransferase, a methylase, an acetylase, an acetyltransferase, a transcriptional activator, or a transcriptional repressor domain. In some embodiments, the nucleic acid editing domain comprises a deaminase domain. In some embodiments, the deaminase domain is selected from any of the deaminase domains provided herein. In some embodiments, the deaminase domain is a cytidine deaminase domain. In some embodiments, the cytidine deaminase domain comprises the amino acid sequence of any one of SEQ ID NOs: 350-389. In some embodiments, the cytidine deaminase domain is a deaminase domain from the apoplipoprotein B mRNA-editing complex (APOBEC) family. In some embodiments, the APOBEC family deaminase is selected from the group consisting of APOBEC1 deaminase, APOBEC2 deaminase, APOBEC3A deaminase, APOBEC3B deaminase, APOBEC3C deaminase, APOBEC3D deaminase, APOBEC3F deaminase, APOBEC3G deaminase, and APOBEC3H deaminase.

[0224] In some embodiments, the fusion protein comprises any of the fusion proteins provided herein. In some embodiments, the fusion protein comprises a Cas9 domain and a cytidine deaminase domain. In some embodiments, the Cas9 domain and the cytidine deaminase are linked via a linker. In some embodiments, the linker comprises the amino acid sequence of any one of SEQ ID NOs: 300-318. In some embodiments, the linker comprises the amino acid sequence SGSETPGTSESATPES (SEQ ID NO: 306). In some embodiments, the fusion protein comprises the amino acid sequence of any one of SEQ ID NOs: 540-542. In some embodiments, the fusion protein further comprises a uracil glycosylase inhibitor (UGI) domain. In some embodiments, the fusion protein comprises the amino acid sequence of any one of SEQ ID NOs: 543-550. In some embodiments, the fusion protein comprises the amino acid sequence of SEQ ID NO: 543. In some embodiments, the fusion protein comprises the amino acid sequence of SEQ ID NO: 544. In some embodiments, the fusion protein comprises a Cas9 domain and one or more adenosine deaminase domains. In some embodiments, one or more of the adenosine deaminase domains comprise the amino acid sequence of any one of SEQ ID NOs: 400-458. In some embodiments, the Cas9 domain and the adenosine deaminase are linked via a linker. In some embodiments, the linker comprises the amino acid sequence of any one of SEQ ID NOs: 300-318. In some embodiments, the fusion protein comprises the amino acid sequence of any one of SEQ ID NOs: 560-586. In some embodiments, the fusion protein further comprises a uracil glycosylase inhibitor (UGI) domain or a dISN domain.

[0225] In another aspect, provided herein are writing loci for use in eukaryotic cells comprising a first nucleic acid sequence encoding (a) a fusion protein comprising a nucleic acid programmable DNA binding protein (napDNAbp) and a nucleic acid editing domain and (b) a single guide RNA (sgRNA), wherein the first nucleic acid sequence of is operably linked to a promoter.

[0226] In some embodiments, the sgRNA associates with the napDNAbp under conditions (e.g., a stimulus or set of stimuli) that induce the expression of the sgRNA and expression of the fusion protein. In some embodiments, the sgRNA is complementary to a target sequence. In some embodiments, the writing locus does not encode an sgRNA. In some embodiments, the napDNAbp of the fusion protein encoded by the writing locus associates with a sgRNA expressed by the cell. In some embodiments, the napDNAbp associates with a sgRNA under conditions (e.g., a stimulus) that induce the expression of the fusion protein, wherein the sgRNA is expressed by the cell.

[0227] In some embodiments, the promoter is appropriate for use in a eukaryotic system. In some embodiments, the promoter is appropriate for use in a mammalian (e.g., human) system. In some embodiments, the promoter is induced by the presence of a stimulus. In some embodiments, the stimulus is a small molecule, a protein, a peptide, an amino acid, a metabolite, an inorganic molecule, an organometallic molecule, an organic molecule, a drug or drug candidate, a sugar, a lipid, a metal, a nucleic acid, a molecule produced during the activation of an endogenous or an exogenous signaling cascade, light, heat, sound, pressure, mechanical stress, shear stress, or a virus (e.g., phage) or other microorganism. In some embodiments, the stimulus is a phage. In some embodiments, the stimulus is light. In some embodiments, the stimulus is a small molecule. In some embodiments, the stimulus is a sugar. In some embodiments, the stimulus is an antibiotic. In some embodiments, the stimulus is a molecule produced during the activation of an endogenous or exogenous signing cascade. In some embodiments, the endogenous signaling cascade is the Wnt signaling cascade. In some embodiments, the molecule produced during the activation of the Wnt signaling cascade (i.e., the stimulus) is beta-catenin. In certain embodiments, the endogenous signaling cascade is, for example, an NF-κB, SMADs, STAT1, STAT2, STAT3, IRF-1, or E2F cascade. In some such embodiments, the stimulus is a cytokine or growth factor such as TNF, TGF-β, IL-6, IFNβ, IFNγ, or EGF. In some embodiments, the endogenous signaling cascade is, for example, a CREB, C/EBP, SRF, NFAT, GR, MAPK/JNK, GATA, RAR, RXR, VDR, ARE, or a XRE/DRE cascade. In certain such embodiments the stimulus is a small molecule such as forskolin, LiCl, PMA, dexamethasone, ATRA, calcitriol, sulforaphane, or TCDD. In some embodiments, the endogenous signaling cascade is an HSF, ATF6, or CBF/NF-Y/YY1 cascade. In some embodiments, the stimulus is anhydrotetracycline, IPTG, rhamnose, arabinose, tanespimycin, tunicamycin, or doxycycline. In some embodiments, the stimulus is doxycycline. In some embodiments, the promoter is an inducible promoter. In some embodiments, the inducible promoter is an inducible RNA polymerase III promoter, a tetracycline-inducible promoter, a light-inducible promoter, a heat-inducible promoter, a promoter induced by the presence of a virus, or a promoter induced by mechanical stress. In some embodiments, the inducible promoter is an tetracycline-inducible promoter. In some embodiments, the inducible RNA polymerase III promoter is an IPTG-inducible RNA polymerase III promoter or a tetracycline-inducible RNA polymerase III promoter. In some embodiments, the inducible promoter is selected from the inducible promoters shown in Table 8 or Table 10. In some embodiments, the promoter is a constitutive promoter. In some embodiments, the constitutive promoter is a constitutive cytomegalovirus (CMV) promoter, a constitutive RNA polymerase III promoter, or a UBC promoter. In some embodiments, the constitutive promoter is selected from the constitutive promoters shown in Table 8. In some embodiments, the constitutive or the inducible promoter comprises a P2A sequence. In some embodiments, the constitutive or the inducible RNA polymerase III promoter comprises a U6 promoter sequence or an H1 promoter sequence.

[0228] In some embodiments, the napDNAbp is a napDNAbp capable of introducing a single-strand break. In some embodiments, the napDNAbp is a RNA-programmable DNA binding protein. In some embodiments, the RNA-programmable DNA binding protein comprises a Cas9 domain, a Cpf1 domain, a CasX domain, a CasY domain, a C2c1 domain, a C2c2 domain, or a C2c3 domain. In some embodiments, the RNA-programmable DNA binding protein comprises a Cas9 domain. In some embodiments, the Cas9 domain is a nuclease inactive Cas9 (dCas9) domain, a Cas9 nickase (Cas9n) domain, or a nuclease active Cas9 domain. In some embodiments, the Cas9 domain is a nuclease inactive dCas9 domain. In some embodiments, the Cas9 domain is a Cas9 nickase (Cas9n) domain. In some embodiments, the Cas9 domain is a Cas9 domain from Streptococcus pyogenes (spCas9). In some embodiments, the Cas9 domain comprises an amino acid sequence that is at least about 70% identical, at least about 80% identical, at least about 90%, at least about 95%, at least about 98%, at least about 99%, at least about 99.5%, or at least about 99.9% identical to the amino acid sequence provided in any one of SEQ ID NOs: 10-260. In some embodiments, the Cas9 domain is a dCas9 domain that comprises a D10A and a H840A mutation in the amino acid sequence provided by SEQ ID NO: 10, or a corresponding mutation in any one of SEQ ID NOs: 11-260. In some embodiments, the dCas9 domain comprises the amino acid sequence of SEQ ID NO: 6. In some embodiments, the Cas9 domain is a Cas9n domain that comprises a D10A or a H840A mutation in the amino acid sequence provided by SEQ ID NO: 10, or a corresponding mutation in any one of SEQ ID NOs: 11-260. In some embodiments, the Cas9 domain is a Cas9n domain that comprises a D10A mutation in the amino acid sequence provided by SEQ ID NO: 10, or a corresponding mutation in any one of SEQ ID NOs: 11-260. In some embodiments, the Cas9 domain comprises the amino acid sequence of SEQ ID NO: 7.

[0229] In some embodiments, the nucleic acid editing domain comprises a deaminase, a nuclease, a nickase, a recombinase, a methyltransferase, a methylase, an acetylase, an acetyltransferase, a transcriptional activator, or a transcriptional repressor domain. In some embodiments, the nucleic acid editing domain comprises a deaminase domain. In some embodiments, the deaminase domain is selected from any of the deaminase domains provided herein. In some embodiments, the deaminase domain is a cytidine deaminase domain. In some embodiments, the cytidine deaminase domain comprises the amino acid sequence of any one of SEQ ID NOs: 350-389. In some embodiments, the cytidine deaminase domain is a deaminase domain from the apoplipoprotein B mRNA-editing complex (APOBEC) family. In some embodiments, the APOBEC family deaminase is selected from the group consisting of APOBEC1 deaminase, APOBEC2 deaminase, APOBEC3A deaminase, APOBEC3B deaminase, APOBEC3C deaminase, APOBEC3D deaminase, APOBEC3F deaminase, APOBEC3G deaminase, and APOBEC3H deaminase.

[0230] In some embodiments, the fusion protein comprises any of the fusion proteins provided herein. In some embodiments, the fusion protein comprises a Cas9 domain and a cytidine deaminase domain. In some embodiments, the Cas9 domain and the cytidine deaminase are linked via a linker. In some embodiments, the linker comprises the amino acid sequence of any one of SEQ ID NOs: 300-318. In some embodiments, the linker comprises the amino acid sequence SGSETPGTSESATPES (SEQ ID NO: 306). In some embodiments, the fusion protein comprises the amino acid sequence of any one of SEQ ID NOs: 540-542. In some embodiments, the fusion protein further comprises a uracil glycosylase inhibitor (UGI) domain. In some embodiments, the fusion protein comprises the amino acid sequence of any one of SEQ ID NOs: 543-550. In some embodiments, the fusion protein comprises the amino acid sequence of SEQ ID NO: 543. In some embodiments, the fusion protein comprises the amino acid sequence of SEQ ID NO: 544. In some embodiments, the fusion protein comprises a Cas9 domain and one or more adenosine deaminase domains. In some embodiments, one or more of the adenosine deaminase domains comprise the amino acid sequence of any one of SEQ ID NOs: 400-458. In some embodiments, the Cas9 domain and the adenosine deaminase are linked via a linker. In some embodiments, the linker comprises the amino acid sequence of any one of SEQ ID NOs: 300-318. In some embodiments, the fusion protein comprises the amino acid sequence of any one of SEQ ID NOs: 560-586. In some embodiments, the fusion protein further comprises a uracil glycosylase inhibitor (UGI) domain or a dISN domain.

[0231] In yet another aspect, provided herein are writing loci for use in eukaryotic cells comprising (i) a nucleic acid sequence encoding a fusion protein comprising a nucleic acid programmable DNA binding protein (napDNAbp) and a nucleic acid editing domain operably linked to a first promoter; (ii) a nucleic acid sequence encoding a single guide RNA (sgRNA) operably linked to a second promoter; and (iii) an origin of replication.

[0232] In some embodiments, the sgRNA associates with the napDNAbp under conditions (e.g., a stimulus or set of stimuli) that induce the expression of the sgRNA and expression of the fusion protein. In some embodiments, the sgRNA is complementary to a target sequence. In some embodiments, the writing locus does not encode a sgRNA. In some embodiments, the napDNAbp encoded by the writing locus associates with a sgRNA expressed by a cell. In some embodiments, the napDNAbp associates with a sgRNA under conditions (e.g., a stimulus) that induce the expression of the fusion protein, wherein the sgRNA is expressed by a cell.

[0233] In some embodiments, at least one of the promoters is induced by the presence of a stimulus. In some embodiments, the stimulus is a small molecule, a protein, a peptide, an amino acid, a metabolite, an inorganic molecule, an organometallic molecule, an organic molecule, a drug or drug candidate, a sugar, a lipid, a metal, a nucleic acid, a molecule produced during the activation of an endogenous or an exogenous signaling cascade, light, heat, sound, pressure, mechanical stress, shear stress, or a virus (e.g., phage) or other microorganism. In some embodiments, the stimulus is a phage. In some embodiments, the stimulus is light. In some embodiments, the stimulus is a small molecule. In some embodiments, the stimulus is a sugar. In some embodiments, the stimulus is an antibiotic. In some embodiments, the stimulus is a molecule produced during the activation of an endogenous or an exogenous signaling cascade. In some embodiments, the stimulus is anhydrotetracycline, IPTG, rhamnose, arabinose, tanespimycin, tunicamycin, or doxycycline. In some embodiments, at least one of the promoters is an inducible promoter. In some embodiments, at least one of the promoters is a constitutive promoter. In some embodiments, the first promoter and the second promoter are different promoters. In some embodiments, the first promoter and the second promoter are different inducible promoters. In some embodiments, the first promoter and the second promoter are different constitutive promoters.

[0234] In some embodiments, the first promoter is appropriate for use in a eukaryotic system. In some embodiments, the promoter is appropriate for use in a mammalian (e.g., human) system. In some embodiments, the first promoter is induced by the presence of a stimulus. In some embodiments, the stimulus is a small molecule, a protein, a peptide, an amino acid, a metabolite, an inorganic molecule, an organometallic molecule, an organic molecule, a drug or drug candidate, a sugar, a lipid, a metal, a nucleic acid, a molecule produced during the activation of an endogenous or an exogenous signaling cascade, light, heat, sound, pressure, mechanical stress, shear stress, or a virus (e.g., phage) or other microorganism. In some embodiments, the stimulus is a phage. In some embodiments, the stimulus is light. In some embodiments, the stimulus is a small molecule. In some embodiments, the stimulus is a sugar. In some embodiments, the stimulus is an antibiotic. In some embodiments, the stimulus is a molecule produced during the activation of an endogenous or exogenous signing cascade. In some embodiments, the endogenous signaling cascade is the Wnt signaling cascade. In some embodiments, the molecule produced during the activation of the Wnt signaling cascade (i.e., the stimulus) is beta-catenin. In certain embodiments, the endogenous signaling cascade is, for example, an NF-κB, SMADs, STAT1, STAT2, STAT3, IRF-1, or E2F cascade. In some such embodiments, the stimulus is a cytokine or growth factor such as TNF, TGF-β, IL-6, IFNβ, IFNγ, or EGF. In some embodiments, the endogenous signaling cascade is, for example, a CREB, C/EBP, SRF, NFAT, GR, MAPK/JNK, GATA, RAR, RXR, VDR, ARE, or a XRE/DRE cascade. In certain such embodiments the stimulus is a small molecule such as forskolin, LiCl, PMA, dexamethasone, ATRA, calcitriol, sulforaphane, or TCDD. In some embodiments, the endogenous signaling cascade is an HSF, ATF6, or CBF/NF-Y/YY1 cascade. In some embodiments, the stimulus is anhydrotetracycline, IPTG, rhamnose, arabinose, tanespimycin, tunicamycin, or doxycycline. In some embodiments, the stimulus is doxycycline. In some embodiments, the first promoter is an inducible promoter. In some embodiments, the inducible promoter is an inducible RNA polymerase III promoter, a tetracycline-inducible promoter, a light-inducible promoter, a heat-inducible promoter, a promoter induced by the presence of a virus, or a promoter induced by mechanical stress. In some embodiments, the inducible promoter is an tetracycline-inducible promoter. In some embodiments, the inducible RNA polymerase III promoter is an IPTG-inducible RNA polymerase III promoter or a tetracycline-inducible RNA polymerase III promoter. In some embodiments, the inducible promoter is selected from the inducible promoters shown in Table 8 or Table 10. In some embodiments, the first promoter is a constitutive promoter. In some embodiments, the constitutive promoter is a constitutive cytomegalovirus (CMV) promoter, a constitutive RNA polymerase III promoter, or a UBC promoter. In some embodiments, the constitutive promoter is selected from the constitutive promoters shown in Table 8. In some embodiments, the constitutive or the inducible promoter comprises a P2A sequence. In some embodiments, the constitutive or the inducible RNA polymerase III promoter comprises a U6 promoter sequence or an H1 promoter sequence.

[0235] In some embodiments, the second promoter is appropriate for use in a eukaryotic system. In some embodiments, the promoter is appropriate for use in a mammalian (e.g., human) system. In some embodiments, the second promoter is induced by the presence of a stimulus. In some embodiments, the stimulus is a small molecule, a protein, a peptide, an amino acid, a metabolite, an inorganic molecule, an organometallic molecule, an organic molecule, a drug or drug candidate, a sugar, a lipid, a metal, a nucleic acid, a molecule produced during the activation of an endogenous or an exogenous signaling cascade, light, heat, sound, pressure, mechanical stress, shear stress, or a virus (e.g., phage) or other microorganism. In some embodiments, the stimulus is a phage. In some embodiments, the stimulus is light. In some embodiments, the stimulus is a small molecule. In some embodiments, the stimulus is a sugar. In some embodiments, the stimulus is an antibiotic. In some embodiments, the stimulus is a molecule produced during the activation of an endogenous or exogenous signing cascade. In some embodiments, the endogenous signaling cascade is the Wnt signaling cascade. In some embodiments, the molecule produced during the activation of the Wnt signaling cascade (i.e., the stimulus) is beta-catenin. In certain embodiments, the endogenous signaling cascade is, for example, an NF-κB, SMADs, STAT1, STAT2, STAT3, IRF-1, or E2F cascade. In some such embodiments, the stimulus is a cytokine or growth factor such as TNF, TGF-β, IL-6, IFNβ, IFNγ, or EGF. In some embodiments, the endogenous signaling cascade is, for example, a CREB, C/EBP, SRF, NFAT, GR, MAPK/JNK, GATA, RAR, RXR, VDR, ARE, or a XRE/DRE cascade. In certain such embodiments the stimulus is a small molecule such as forskolin, LiCl, PMA, dexamethasone, ATRA, calcitriol, sulforaphane, or TCDD. In some embodiments, the endogenous signaling cascade is an HSF, ATF6, or CBF/NF-Y/YY1 cascade. In some embodiments, the stimulus is anhydrotetracycline, IPTG, rhamnose, arabinose, tanespimycin, tunicamycin, or doxycycline. In some embodiments, the stimulus is doxycycline. In some embodiments, the second promoter is an inducible promoter. In some embodiments, the inducible promoter is an inducible RNA polymerase III promoter, a tetracycline-inducible promoter, a light-inducible promoter, a heat-inducible promoter, a promoter induced by the presence of a virus, or a promoter induced by mechanical stress. In some embodiments, the inducible promoter is an tetracycline-inducible promoter. In some embodiments, the inducible RNA polymerase III promoter is an IPTG-inducible RNA polymerase III promoter or a tetracycline-inducible RNA polymerase III promoter. In some embodiments, the inducible promoter is selected from the inducible promoters shown in Table 8 or Table 10. In some embodiments, the second promoter is a constitutive promoter. In some embodiments, the constitutive promoter is a constitutive cytomegalovirus (CMV) promoter, a constitutive RNA polymerase III promoter, or a UBC promoter. In some embodiments, the constitutive promoter is selected from the constitutive promoters shown in Table 8. In some embodiments, the constitutive or the inducible promoter comprises a P2A sequence. In some embodiments, the constitutive or the inducible RNA polymerase III promoter comprises a U6 promoter sequence or an H1 promoter sequence.

[0236] In some embodiments, the integrated writing system comprises: (i) a nucleic acid sequence encoding a fusion protein comprising a napDNAbp and a nucleic acid editing domain operably linked to a constitutive promoter, and (ii) a nucleic acid encoding a sgRNA operably liked to an inducible promoter, wherein the sgRNA is complementary to a target sequence. In some embodiments, the fusion protein is constitutively expressed and the napDNAbp associates with the sgRNA under conditions (e.g., a stimulus or set of stimuli) that induce the expression of the sgRNA, wherein both nucleic acid sequences are integrated into the genome of a eukaryotic cell.

[0237] In some embodiments, the integrated writing system comprises: (i) a nucleic acid sequence encoding a fusion protein comprising a napDNAbp and a nucleic acid editing domain operably linked to an inducible promoter, and (ii) a nucleic acid encoding a sgRNA operably liked to a constitutive promoter, wherein the sgRNA is complementary to a target sequence, wherein both nucleic acid sequences are integrated into the genome of a eukaryotic cell. In some embodiments, the sgRNA is constitutively expressed and associates with the napDNAbp under conditions (e.g., a stimulus or set of stimuli) that induce the expression of the fusion protein. In some embodiments, the inducible promoter is a tetracycline-inducible promoter. In some embodiments, the stimulus that induces the expression of the fusion protein is doxycycline. In some embodiments, the constitutive promoter is a constitutive U6 promoter.

[0238] In some embodiments, the integrated writing system comprises: (i) a nucleic acid sequence encoding a fusion protein comprising a napDNAbp and a nucleic acid editing domain operably linked to an inducible promoter, and (ii) a nucleic acid encoding a sgRNA operably liked to a constitutive promoter, wherein the sgRNA is complementary to a target sequence, wherein both nucleic acid sequences are integrated into the genome of a eukaryotic cell. In some embodiments, the sgRNA is constitutively expressed and associates with the napDNAbp under conditions (e.g., a stimulus or set of stimuli) that induce the expression of the fusion protein. In some embodiments, the inducible promoter is induced by a signaling molecule produced during the activation of an endogenous or an exogenous signaling cascade. In some embodiments, the endogenous signaling cascade is the Wnt signaling cascade. In some embodiments, the signaling molecule produced during an activated Wnt signaling cascade is beta-catenin. In some embodiments, the stimulus that induces the expression of the fusion protein is beta-catenin. In certain embodiments, the endogenous signaling cascade is, for example, an NF-κB, SMADs, STAT1, STAT2, STAT3, IRF-1, or E2F cascade. In some such embodiments, the stimulus is a cytokine or growth factor such as TNF, TGF-β, IL-6, IFNβ, IFNγ, or EGF. In some embodiments, the endogenous signaling cascade is, for example, a CREB, C/EBP, SRF, NFAT, GR, MAPK/JNK, GATA, RAR, RXR, VDR, ARE, or a XRE/DRE cascade. In certain such embodiments the stimulus is a small molecule such as forskolin, LiCl, PMA, dexamethasone, ATRA, calcitriol, sulforaphane, or TCDD. In some embodiments, the endogenous signaling cascade is an HSF, ATF6, or CBF/NF-Y/YY1 cascade. In some embodiments, the stimulus is anhydrotetracycline, IPTG, rhamnose, arabinose, tanespimycin, tunicamycin, or doxycycline. In some embodiments, the constitutive promoter is a constitutive U6 promoter. In some embodiments, the nucleic acid sequence of (i) or (ii) further comprises a nucleic acid sequence encoding a second protein. In some embodiments, the nucleic acid sequence of (i) further comprises a nucleic acid sequence encoding a second protein. In some embodiments, the second protein is luciferase. In some embodiments, the nucleic acid sequence encoding the reporter protein is connected to the 3′ end of the nucleic acid sequence of (i) by an intervening P2A sequence.

[0239] In some embodiments, the napDNAbp is a napDNAbp capable of introducing a single-strand break. In some embodiments, the napDNAbp is a RNA-programmable DNA binding protein. In some embodiments, the RNA-programmable DNA binding protein comprises a Cas9 domain, a Cpf1 domain, a CasX domain, a CasY domain, a C2c1 domain, a C2c2 domain, or a C2c3 domain. In some embodiments, the RNA-programmable DNA binding protein comprises a Cas9 domain. In some embodiments, the Cas9 domain is a nuclease inactive Cas9 (dCas9) domain, a Cas9 nickase (Cas9n) domain, or a nuclease active Cas9 domain. In some embodiments, the Cas9 domain is a nuclease inactive dCas9 domain. In some embodiments, the Cas9 domain is a Cas9 nickase (Cas9n) domain. In some embodiments, the Cas9 domain is a Cas9 domain from Streptococcus pyogenes (spCas9). In some embodiments, the Cas9 domain comprises an amino acid sequence that is at least about 70% identical, at least about 80% identical, at least about 90%, at least about 95%, at least about 98%, at least about 99%, at least about 99.5%, or at least about 99.9% identical to the amino acid sequence provided in any one of SEQ ID NOs: 10-260. In some embodiments, the Cas9 domain is a dCas9 domain that comprises a D10A and a H840A mutation in the amino acid sequence provided by SEQ ID NO: 10, or a corresponding mutation in any one of SEQ ID NOs: 11-260. In some embodiments, the dCas9 domain comprises the amino acid sequence of SEQ ID NO: 6. In some embodiments, the Cas9 domain is a Cas9n domain that comprises a D10A or a H840A mutation in the amino acid sequence provided by SEQ ID NO: 10, or a corresponding mutation in any one of SEQ ID NOs: 11-260. In some embodiments, the Cas9 domain is a Cas9n domain that comprises a D10A mutation in the amino acid sequence provided by SEQ ID NO: 10, or a corresponding mutation in any one of SEQ ID NOs: 11-260. In some embodiments, the Cas9 domain comprises the amino acid sequence of SEQ ID NO: 7.

[0240] In some embodiments, the nucleic acid editing domain comprises a deaminase, a nuclease, a nickase, a recombinase, a methyltransferase, a methylase, an acetylase, an acetyltransferase, a transcriptional activator, or a transcriptional repressor domain. In some embodiments, the nucleic acid editing domain comprises a deaminase domain. In some embodiments, the deaminase domain is selected from any of the deaminase domains provided herein. In some embodiments, the deaminase domain is a cytidine deaminase domain. In some embodiments, the cytidine deaminase domain comprises the amino acid sequence of any one of SEQ ID NOs: 350-389. In some embodiments, the cytidine deaminase domain is a deaminase domain from the apoplipoprotein B mRNA-editing complex (APOBEC) family. In some embodiments, the APOBEC family deaminase is selected from the group consisting of APOBEC1 deaminase, APOBEC2 deaminase, APOBEC3A deaminase, APOBEC3B deaminase, APOBEC3C deaminase, APOBEC3D deaminase, APOBEC3F deaminase, APOBEC3G deaminase, and APOBEC3H deaminase.

[0241] In some embodiments, the fusion protein comprises any of the fusion proteins provided herein. In some embodiments, the fusion protein comprises a Cas9 domain and a cytidine deaminase domain. In some embodiments, the Cas9 domain and the cytidine deaminase are linked via a linker. In some embodiments, the linker comprises the amino acid sequence of any one of SEQ ID NOs: 300-318. In some embodiments, the linker comprises the amino acid sequence SGSETPGTSESATPES (SEQ ID NO: 306). In some embodiments, the fusion protein comprises the amino acid sequence of any one of SEQ ID NOs: 540-542. In some embodiments, the fusion protein further comprises a uracil glycosylase inhibitor (UGI) domain. In some embodiments, the fusion protein comprises the amino acid sequence of any one of SEQ ID NOs: 543-550. In some embodiments, the fusion protein comprises the amino acid sequence of SEQ ID NO: 543. In some embodiments, the fusion protein comprises the amino acid sequence of SEQ ID NO: 544. In some embodiments, the fusion protein comprises a Cas9 domain and one or more adenosine deaminase domains. In some embodiments, one or more of the adenosine deaminase domains comprise the amino acid sequence of any one of SEQ ID NOs: 400-458. In some embodiments, the Cas9 domain and the adenosine deaminase are linked via a linker. In some embodiments, the linker comprises the amino acid sequence of any one of SEQ ID NOs: 300-318. In some embodiments, the fusion protein comprises the amino acid sequence of any one of SEQ ID NOs: 560-586. In some embodiments, the fusion protein further comprises a uracil glycosylase inhibitor (UGI) domain or a dISN domain.

[0242] Some aspects of the present disclosure provide a writing locus for use with one or more additional loci (e.g., accessory loci) that employ both an inducible promoter and a repressor system for control of the expression of one or more components of the writing locus (e.g., napDNAbp, fusion protein, sgRNA). Without wishing to be bound by any particular theory, this combination of repressors and inducible promoters can allow for the recording of multiple inputs (e.g., stimuli) in an order-dependent manner.

[0243] In some embodiments, a writing locus of the integrated writing system is used in combination with one or more additional loci. In some embodiments, the writing locus is used in combination with (i) a second locus comprising a nucleic acid sequence encoding a sgRNA operably linked to a constitutive promoter comprising a repressor binding site, wherein the sgRNA is complementary to a target sequence; and (ii) a third locus comprising a nucleic acid sequence encoding one or more repressor proteins operably linked to a second constitutive promoter. In some embodiments, the repressor protein and sgRNA are constitutively expressed, and the repressor protein binds to the repressor binding site of the constitutive promoter. In some embodiments, the nucleic acid sequence of (ii) encodes one repressor protein. In some embodiments, the repressor protein is a tetracycline repressor protein (Tet_{R}) or a lactose repressor protein (LacI). In some embodiments, the nucleic acid sequence of (ii) encodes a first repressor protein and a second repressor protein, wherein an intervening P2A sequence separates the nucleic acid sequences encoding the first and second repressor proteins. In some embodiments, the first repressor protein or the second repressor protein is a tetracycline repressor protein (Tet_{R}). In some embodiments, the first repressor protein or the second repressor protein is a lactose repressor protein (LacI). In some embodiments, the first repressor protein and the second repressor protein are not the same. In some embodiments, the first repressor protein is a lactose repressor protein (LacI). In some embodiments, the lactose repressor protein cannot bind to the first repressor binding site in the presence of IPTG. In some embodiments, the second repressor protein is a tetracycline repressor protein (Tet_{R}). In some embodiments, the tetracycline repressor protein cannot bind to the second repressor binding site in the presence of tetracycline, or a derivative thereof. In some embodiments, the tetracycline, or derivative thereof, is doxycylcline. In some embodiments, the writing locus is used in combination with a fourth locus comprising a nucleic acid encoding a second sgRNA operably linked to a third constitutive promoter comprising a second repressor binding site, wherein the second sgRNA is complementary to a target sequence, wherein the second repressor protein and the second sgRNA are constitutively expressed, and wherein the second repressor protein binds to the second repressor binding site of the third constitutive promoter. In some embodiments, the first constitutive promoter, the second constitutive promoter, and the third constitutive promoter are selected from a CMV promoter, a U6 promoter, a H1 promoter, or a UBC promoter. In some embodiments, the first constitutive promoter, the second constitutive promoter, and the third constitutive promoter are selected from a constitutive promoter listed in Table 8. In some embodiments, the first constitutive promoter, the second constitutive promoter, and the third constitutive promoter are different constitutive promoters. In some embodiments, the first constitutive promoter is a U6 promoter. In some embodiments, the second constitutive promoter is a UBC promoter. In some embodiments, the third constitutive promoter is a H1 promoter.

[0244] In some embodiments, the napDNAbp is a napDNAbp capable of introducing a single-strand break. In some embodiments, the napDNAbp is a RNA-programmable DNA binding protein. In some embodiments, the RNA-programmable DNA binding protein comprises a Cas9 domain, a Cpf1 domain, a CasX domain, a CasY domain, a C2c1 domain, a C2c2 domain, or a C2c3 domain. In some embodiments, the RNA-programmable DNA binding protein comprises a Cas9 domain. In some embodiments, the Cas9 domain is a nuclease inactive Cas9 (dCas9) domain, a Cas9 nickase (Cas9n) domain, or a nuclease active Cas9 domain. In some embodiments, the Cas9 domain is a nuclease inactive dCas9 domain. In some embodiments, the Cas9 domain is a Cas9 nickase (Cas9n) domain. In some embodiments, the Cas9 domain is a Cas9 domain from Streptococcus pyogenes (spCas9). In some embodiments, the Cas9 domain comprises an amino acid sequence that is at least about 70% identical, at least about 80% identical, at least about 90%, at least about 95%, at least about 98%, at least about 99%, at least about 99.5%, or at least about 99.9% identical to the amino acid sequence provided in any one of SEQ ID NOs: 10-260. In some embodiments, the Cas9 domain is a dCas9 domain that comprises a D10A and a H840A mutation in the amino acid sequence provided by SEQ ID NO: 10, or a corresponding mutation in any one of SEQ ID NOs: 11-260. In some embodiments, the dCas9 domain comprises the amino acid sequence of SEQ ID NO: 6. In some embodiments, the Cas9 domain is a Cas9n domain that comprises a D10A or a H840A mutation in the amino acid sequence provided by SEQ ID NO: 10, or a corresponding mutation in any one of SEQ ID NOs: 11-260. In some embodiments, the Cas9 domain is a Cas9n domain that comprises a D10A mutation in the amino acid sequence provided by SEQ ID NO: 10, or a corresponding mutation in any one of SEQ ID NOs: 11-260. In some embodiments, the Cas9 domain comprises the amino acid sequence of SEQ ID NO: 7.

[0245] In some embodiments, the nucleic acid editing domain comprises a deaminase, a nuclease, a nickase, a recombinase, a methyltransferase, a methylase, an acetylase, an acetyltransferase, a transcriptional activator, or a transcriptional repressor domain. In some embodiments, the nucleic acid editing domain comprises a deaminase domain. In some embodiments, the deaminase domain is selected from any of the deaminase domains provided herein. In some embodiments, the deaminase domain is a cytidine deaminase domain. In some embodiments, the cytidine deaminase domain comprises the amino acid sequence of any one of SEQ ID NOs: 350-389. In some embodiments, the cytidine deaminase domain is a deaminase domain from the apoplipoprotein B mRNA-editing complex (APOBEC) family. In some embodiments, the APOBEC family deaminase is selected from the group consisting of APOBEC1 deaminase, APOBEC2 deaminase, APOBEC3A deaminase, APOBEC3B deaminase, APOBEC3C deaminase, APOBEC3D deaminase, APOBEC3F deaminase, APOBEC3G deaminase, and APOBEC3H deaminase.

[0246] In some embodiments, the fusion protein comprises any of the fusion proteins provided herein. In some embodiments, the fusion protein comprises a Cas9 domain and a cytidine deaminase domain. In some embodiments, the Cas9 domain and the cytidine deaminase are linked via a linker. In some embodiments, the linker comprises the amino acid sequence of any one of SEQ ID NOs: 300-318. In some embodiments, the linker comprises the amino acid sequence SGSETPGTSESATPES (SEQ ID NO: 306). In some embodiments, the fusion protein comprises the amino acid sequence of any one of SEQ ID NOs: 540-542. In some embodiments, the fusion protein further comprises a uracil glycosylase inhibitor (UGI) domain. In some embodiments, the fusion protein comprises the amino acid sequence of any one of SEQ ID NOs: 543-550. In some embodiments, the fusion protein comprises the amino acid sequence of SEQ ID NO: 543. In some embodiments, the fusion protein comprises the amino acid sequence of SEQ ID NO: 544. In some embodiments, the fusion protein comprises a Cas9 domain and one or more adenosine deaminase domains. In some embodiments, one or more of the adenosine deaminase domains comprise the amino acid sequence of any one of SEQ ID NOs: 400-458. In some embodiments, the Cas9 domain and the adenosine deaminase are linked via a linker. In some embodiments, the linker comprises the amino acid sequence of any one of SEQ ID NOs: 300-318. In some embodiments, the fusion protein comprises the amino acid sequence of any one of SEQ ID NOs: 560-586. In some embodiments, the fusion protein further comprises a uracil glycosylase inhibitor (UGI) domain or a dISN domain.

[0247] One of ordinary skill in the art will recognize based on this disclosure and knowledge in the field that additional promoters operably linked to additional sgRNA sequences, or additional fusion proteins (e.g., comprising an orthogonal napDNAbp, such as an orthogonal Cas9 domain) operably linked to additional promoters, can be included in each of the writing loci for use in a eukaryotic system (e.g., a eukaryotic cell) described above, and thus the disclosure in not limited in that regard. In some embodiments, the eukaryotic system is a mammalian system (e.g., a mammalian cell). In some embodiments, the mammalian system is a human system (e.g., a human cell).

### Recording Plasmids and Recording Loci

[0248] A writing plasmid described above may be used in combination with one or more recording plasmids provided herein. In general, the recording plasmid provides a target sequence that is complementary to the sgRNA that is associated with the napDNAbp provided by the writing plasmid. Changes in the target sequence induced by the expressed napDNAbp and sgRNA pair (e.g., double-strand breaks, nucleobase editing) can be monitored (i.e., “recorded”), for example, by sequencing the target sequence within the recording plasmid. In addition, a target sequence that correlates changes in DNA to a measurable quantity, such as, for example, the amount of fluorescence in a cell, can be chosen (e.g., a target sequence in a gene encoding a fluorescent protein). Alternatively, a target sequence can be a sequence in the genome of a cell (i.e., a recording locus), and changes in the target sequence induced by the expressed napDNAbp and sgRNA pair (e.g., double-strand breaks, nucleobase editing) can be monitored (i.e., “recorded”), for example, by sequencing the target sequence within the recording locus.

[0249] Some aspects of the present disclosure provide recording plasmids comprising one or more target sequences that are complementary to an sgRNA expressed in a cell. In some embodiments, the sgRNA is encoded by any of the the writing plasmids described herein. In some embodiments, the recording plasmid is a recording plasmid listed in Table 3. In some embodiments, the sgRNA is encoded by a plasmid separate from the writing plasmid (e.g., an accessory plasmid). Without wishing to be bound by any particular theory, recording plasmids allow for stable, reproducible, and robust recording of a stimulus or stimuli of interest. For example, the writing plasmids used herein can sensitively detect and record the presence of one or more endogenous or exogenous stimuli, as well as provide information regarding the duration of the exposure to the stimulus (stimuli). In some aspects, the recording plasmids described herein are designed for use with a writing plasmid described herein in a prokaryotic system, where the recording plasmids are engineered high-copy number plasmids that enable analog recording of a stimulus or stimuli in a cell without requiring a large sample cell population. In addition, the recording plasmids do not impose a high fitness cost on the host system (e.g., bacterial cell, e.g., E. coli cell), allowing for the stable maintenance of recording plasmid levels, including a stable ratio of two recording plasmids, in the host system (e.g., bacterial cell, e.g., E. coli cell).

[0250] In some embodiments, the recording plasmid comprises one target sequence. In some embodiments, the recording plasmid comprises two, three, four, or five target sequences. In some embodiments, the target sequence is complementary to a sgRNA sequence provided herein, for example, a sgRNA sequence comprising a nucleic acid sequence shown in Table 5.

[0251] In some embodiments, the target sequence is present in a reporter gene. In some embodiments, the reporter gene is an EFGP gene. In some embodiments, the EGFP gene comprises the nucleic acid sequence of the wild-type EGFP gene. In some embodiments, the EGFP gene comprises the nucleic acid sequence of SEQ ID NO: M1. In some embodiments, the EGFP gene comprises the nucleic acid sequence of a modified EGFP gene. In some embodiments, the EGFP gene comprises a premature stop codon (TGA) relative to the nucleic acid sequence of the wild-type EGFP gene. In some embodiments, the EGFP gene comprises a premature stop codon (TGA) at codon 151 (EGFP-TGA151). In some embodiments, the EGFP gene comprises the nucleic acid sequence of SEQ ID NO: M2. In some embodiments, the EGFP gene comprises one or more insertions, deletions, or mutations relative to the nucleic acid sequence of the wild-type EGFP gene. In some embodiments, the EGFP gene comprises an insertion comprising 1, 2, 3, 4, 5, 6, 7, 8, 9, 10, 11, 12, 13, 14, 15, 16, 17, 18, 19, 20, 21, 22, 23, 24, 25, or more nucleic acids. In some embodiments, the EGFP gene comprises an insertion between codon 115 and codon 135 (EGFP-115-135insertion) relative to the nucleic acid sequence of the wild-type EGFP gene. In some embodiments, the EGFP gene comprises a T206G mutation relative to the nucleic acid sequence of the wild-type EGFP gene. In some embodiments, the EGFP gene comprises an insertion between codon 115 and codon 135 (EGFP-115-135insertion) and a T206G mutation (EGFP-115-135insertion, T206G) relative to the nucleic acid sequence of the wild-type EGFP gene. In some embodiments, the EGFP gene comprises the nucleic acid sequence of SEQ ID NO: M3. In some embodiments, the target sequence comprises the nucleic acid sequence of SEQ ID NO: 620. In some embodiments, the target sequence comprises the nucleic acid sequence of SEQ ID NO: 621. In some embodiments, the target sequence comprises the nucleic acid sequence of SEQ ID NO: 622. In some embodiments, the target sequence comprises the nucleic acid sequence of SEQ ID NO: 623. In some embodiments, the target sequence comprises the nucleic acid sequence of SEQ ID NO: 624. In some embodiments, the target sequence comprises the nucleic acid sequence of SEQ ID NO: 625. In some embodiments, the target sequence comprises the nucleic acid sequence of SEQ ID NO: 626.

[0252] In some embodiments, the target sequence is present in a reporter gene comprising a nucleic acid sequence that encodes a protein. In some embodiments, the protein is a reporter protein. For example, the reporter gene can encode a reporter protein that is detectable and quantifiable. In some embodiments, the reporter protein induces visually identifiable characteristics which includes, without limitation fluorescent and luminescent proteins. Examples include the gene that encodes jellyfish green fluorescent protein (GFP), which causes cells that express it to glow green under blue light, the enzyme luciferase, which catalyzes a reaction with luciferin to produce light, and the red fluorescent protein from the gene dsRed. In some embodiments, the reporter protein is a fluorescent protein. In some embodiments, the reporter protein is a green fluorescent protein (GFP). In some embodiments, the reporter protein is an enhanced green fluorescent protein (EGFP). In some embodiments, the reporter is a reporter that can be used in bacteria. A common reporter in bacteria is the E. coli lacZ gene, which encodes the protein beta-galactosidase. This enzyme causes bacteria expressing the gene to appear blue when grown on a medium that contains the substrate analog X-gal. An example of a selectable-marker which is also a reporter in bacteria is the chloramphenicol acetyltransferase (CAT) gene, which confers resistance to the antibiotic chloramphenicol.

[0253] In some embodiments, the target sequence is present in a reporter gene comprising a nucleic acid sequence that encodes a full-length EFGP protein. In some embodiments, the full-length EFGP protein comprises the amino acid sequence of SEQ ID NO: 660. In some embodiments, the reporter gene comprises a nucleic acid sequence that encodes a EFGP protein variant. In some embodiments, the EGFP variant comprises the amino acid sequence of SEQ ID NO: 662. In some embodiments, the reporter gene comprises a nucleic acid sequence that encodes a truncated EFGP protein. In some embodiments, the truncated EFGP protein comprises the amino acid sequence of SEQ ID NOS 661 and 866. The truncated EGFP protein may be any EGFP protein that cannot fluoresce (i.e., a non-functional reporter protein).

EGFP (wild-type, full-length):
(SEQ ID NO: 660)
MVSKGEELFTGVVPILVELDGDVNGHKFSVSGEGEGDATYGKLTLKFICT
TGKLPVPWPTLVTTLTYGVQCFSRYPDHMKQHDFFKSAMPEGYVQERTIF
FKDDGNYKTRAEVKFEGDTLVNRIELKGIDFKEDGNILGHKLEYNYNSHN
VYIMADKQKNGIKVNFKIRHNIEDGSVQLADHYQQNTPIGDGPVLLPDNH
YLSTQSALSKDPNEKRDHMVLLEFVTAAGITLGMDELYK
EGFP-151TGA:
MVSKGEELFTGVVPILVELDGDVNGHKFSVSGEGEGDATYGKLTLKFICT
*GKLPVPWPTLVTTLTYGVQCFSRYPDHMKQHDFFKSAMPEGYVQERTIF
FKDDGNYKTRAEVKFEGDTLVNRIELKGIDFKEDGNILGHKLEYNYNSHN
VYIMADKQKNGIKVNFKIRHNIEDGSVQLADHYQQNTPIGDGPVLLPDNH
YLSTQSALSKDPNEKRDHMVLLEFVTAAGITLGMDELYK
(SEQ ID NOS 661 and 866, respectively, in order
of appearance)
EGFP-115-135insertion/T206G:
(SEQ ID NO: 662)
MVSKGEELFTGVVPILVELDGDVNGHKFSVSGEGEGDALKTTLTYTYGKL
TLKFICTTGKLPVPWPTLGTTLTYGVQCFSRYPDHMKQHDFFKSAMPEGY
VQERTIFFKDDGNYKTRAEVKFEGDTLVNRIELKGIDFKEDGNILGHKLE
YNYNSHNVYIMADKQKNGIKVNFKIRHNIEDGSVQLADHYQQNTPIGDGP
VLLPDNHYLSTQSALSKDPNEKRDHMVLLEFVTAAGITLGMDELYK

[0254] In some embodiments, variants or homologues of EGFP (e.g., variants of SEQ ID NO: 660) are provided which are at least about 70% identical, at least about 80% identical, at least about 90% identical, at least about 95% identical, at least about 98% identical, at least about 99% identical, at least about 99.5% identical, or at least about 99.9% identical to SEQ ID NO: 660. In some embodiments, variants of EGFP (e.g., variants of SEQ ID NO: 660) are provided having amino acid sequences which are shorter, or longer than SEQ ID NO: 660, by about 5 amino acids, by about 10 amino acids, by about 15 amino acids, by about 20 amino acids, by about 25 amino acids, by about 30 amino acids, by about 40 amino acids, by about 50 amino acids, by about 75 amino acids, by about 100 amino acids, or more.

[0255] In some embodiments, the recording plasmid further comprises one or more nucleic acid sequences encoding one or more antibiotic resistant proteins, or variants thereof. Without wishing to be bound by any particular theory, the inclusion of one or more antibiotic resistance proteins in the recording plasmid system provides a mechanism for “resetting” or “erasing” a cell data recorder system that comprises the recording plasmid (see Example 3). In some embodiments, the recording plasmid comprises one nucleic acid sequence encoding an antibiotic resistant protein, or variant thereof. In some embodiments, the antibiotic resistance protein comprises one or more mutations in the amino acid sequence of the wild-type antibiotic resistance protein.

[0256] In some embodiments, the antibiotic resistance protein is chloramphenicol acetyltransferase (Cat). When expressed, the Cat protein confers chloramphenicol resistance to the host system (e.g. E. coli cell). In some embodiments, the Cat protein comprises the amino acid sequence of SEQ ID NO: P1. In some embodiments, the Cat protein comprises one or more mutations in the amino acid sequence of the wild-type antibiotic protein (e.g., SEQ ID NO: P1). In some embodiments, the antibiotic resistance protein is a Cat variant (e.g., the Cat variant comprises one or more inactivating mutations). In some embodiments, the Cat variant does not confer chloramphenicol resistance. In some embodiments, the Cat variant comprises a H195A mutation in the amino acid sequence provided by SEQ ID NO: P1.

[0257] In some embodiments, the antibiotic resistance protein is aminoglycoside-3′-phosphotransferase (Aph3′). When expressed, the Aph3′ protein confers kanamycin resistance to the host system (e.g. E. coli cell). In some embodiments, the Aph3′ protein comprises the amino acid sequence of SEQ ID NO: P2. In some embodiments, the Aph3′ protein comprises one or more mutations in the amino acid sequence of the wild-type antibiotic protein (e.g., SEQ ID NO: P2). In some embodiments, the antibiotic resistance protein is a Aph3′ variant (e.g., the Aph3′ variant comprises one or more inactivating mutations). In some embodiments, the Aph3′ variant does not confer kanamycin resistance. In some embodiments, the Aph3′ variant comprises a D208A mutation in the amino acid sequence provided by SEQ ID NO: P2.

[0258] In some embodiments, the recording plasmid comprises two nucleic acid sequences, wherein each sequence encodes an antibiotic resistant protein, or variant thereof. In some embodiments, one of the antibiotic resistance proteins comprises one or more mutations in the amino acid sequence of the wild-type antibiotic protein. In some embodiments, the recording plasmid comprises a nucleic acid sequence encoding a Cat protein, or variant thereof, and a nucleic acid sequence encoding a Aph3′ protein, or variant thereof. In some embodiments, the Cat protein comprises the amino acid sequence of SEQ ID NO: P1. In some embodiments, the Cat variant comprises a H195A mutation in the amino acid sequence provided by SEQ ID NO: P1. In some embodiments, the Aph3′ protein comprises the amino acid sequence of SEQ ID NO: P2. In some embodiments, the Aph3′ variant comprises a D208A mutation in the amino acid sequence provided by SEQ ID NO: P2. In some embodiments, the recording plasmid comprises a nucleic acid sequence encoding a Cat protein, or variant thereof, and a nucleic acid sequence encoding a Aph3′ protein, or variant thereof. In some embodiments, the recording plasmid comprises (a) a nucleic acid sequence encoding a Cat variant comprising a H195A mutation in the amino acid sequence provided by SEQ ID NO: P1, wherein the H195A mutation results in a Cat protein that does not confer chloramphenicol resistance, and (b) a nucleic acid sequence encoding aminoglycoside-3′-phosphotransferase (Aph3′), wherein the Aph3′ protein confers kanamycin resistance. In some embodiments, the recording plasmid comprises the nucleic acid sequence of SEQ ID NO: 667. In some embodiments, the recording plasmid encodes a protein comprising the amino acid sequence of SEQ ID NO: 668. In some embodiments, the recording plasmid comprises (a) a nucleic acid sequence encoding chloramphenicol acetyltransferase (Cat), and wherein the Cat protein confers chloramphenicol resistance, and (b) a nucleic acid sequence encoding a Aph3′ protein comprising a D208A mutation in the amino acid sequence provided by SEQ ID NO: P2, and wherein the D208A mutation results in a Aph3′ protein that does not confer kanamycin resistance. In some embodiments, the recording plasmid comprises the nucleic acid sequence of SEQ ID NO: 669. In some embodiments, the recording plasmid encodes a protein comprising the amino acid sequence of SEQ ID NO: 670.

Cat*- Aph3′ (*denotes H195A active site mutation) nucleic acid
sequence
(SEQ ID NO: 667)
ATGGAGAAAAAAATCACTGGATATACCACCGTTGATATATCCCAATGGCATCGTAAAGAACATTTTGAGGCAT
TTCAGTCAGTTGCTCAATGTACCTATAACCAGACCGTTCAGCTGGATATTACGGCCTTTTTAAAGACCGTAAA
GAAAAATAAGCACAAGTTTTATCCGGCCTTTATTCACATTCTTGCCCGCCTGATGAATGCTCATCCGGAGTTC
CGTATGGCAATGAAAGACGGTGAGCTGGTGATATGGGATAGTGTTCACCCTTGTTACACCGTTTTCCATGAGC
AAACTGAAACGTTTTCATCGCTCTGGAGTGAATACCACGACGATTTCCGGCAGTTTCTACACATATATTCGCA
AGATGTGGCGTGTTACGGTGAAAACCTGGCCTATTTCCCTAAAGGGTTTATTGAGAATATGTTTTTCGTCTCA
GCCAATCCCTGGGTGAGTTTCACCAGTTTTGATTTAAACGTGGCCAATATGGACAACTTCTTCGCCCCCGTTT
TCACTATGGGCAAATATTATACGCAAGGCGACAAGGTGCTGATGCCGCTGGCGATTCAGGTTCATGCTGCCGT
TTGTGATGGCTTCCATGTCGGCAGAATGCTTAATGAATTACAACAGTACTGCGATGAGTGGCAGGGCGGGGCG
GGCAGCGGTTCTGGCTCCAGCCATATTCAACGGGAAACGTCTTGCTCGAGGCCGCGATTAAATTCCAACATGG
ATGCTGATTTATATGGGTATAAATGGGCTCGCGATAATGTCGGGCAATCAGGTGCGACAATCTATCGATTGTA
TGGGAAGCCCGATGCGCCAGAGTTGTTTCTGAAACATGGCAAAGGTAGCGTTGCCAATGATGTTACAGATGAG
ATGGTCAGACTAAACTGGCTGACGGAATTTATGCCTCTTCCGACCATCAAGCATTTTATCCGTACTCCTGATG
ATGCATGGTTACTCACCACTGCGATCCCCGGGAAAACAGCATTCCAGGTATTAGAAGAATATCCTGATTCAGG
TGAAAATATTGTTGATGCGCTGGCAGTGTTCCTGCGCCGGTTGCATTCGATTCCTGTTTGTAATTGTCCTTTT
AACAGCGATCGCGTATTTCGTCTCGCTCAGGCGCAATCACGAATGAATAACGGTTTGGTTGATGCGAGTGATT
TTGATGACGAGCGTAATGGCTGGCCTGTTGAACAAGTCTGGAAAGAAATGCATAAGCTTTTGCCATTCTCACC
GGATTCAGTCGTCACTCATGGTGATTTCTCACTTGATAACCTTATTTTTGACGAGGGGAAATTAATAGGTTGT
ATTGATGTTGGACGAGTCGGAATCGCAGACCGATACCAGGATCTTGCCATCCTATGGAACTGCCTCGGTGAGT
TTTCTCCTTCATTACAGAAACGGCTTTTTCAAAAATATGGTATTGATAATCCTGATATGAATAAATTGCAGTT
TCATTTGATGCTCGATGAGTTTTTCTAA
Cat*- Aph3′ (*denotes H195A active site mutation) amino acid sequence
(SEQ ID NO: 668)
MEKKITGYTTVDISQWHRKEHFEAFQSVAQCTYNQTVQLDITAFLKTVKKNKHKFYPAFIHILARLMNAHPEF
RMAMKDGELVIWDSVHPCYTVFHEQTETFSSLWSEYHDDFRQFLHIYSQDVACYGENLAYFPKGFIENMFFVS
ANPWVSFTSFDLNVANMDNFFAPVFTMGKYYTQGDKVLMPLAIQVHAAVCDGFHVGRMLNELQQYCDEWQGGA
GSGSGSSHIQRETSCSRPRLNSNMDADLYGYKWARDNVGQSGATIYRLYGKPDAPELFLKHGKGSVANDVTDE
MVRLNWLTEFMPLPTIKHFIRTPDDAWLLTTAIPGKTAFQVLEEYPDSGENIVDALAVFLRRLHSIPVCNCPF
NSDRVFRLAQAQSRMNNGLVDASDFDDERNGWPVEQVWKEMHKLLPFSPDSVVTHGDFSLDNLIFDEGKLIGC
IDVGRVGIADRYQDLAILWNCLGEFSPSLQKRLFQKYGIDNPDMNKLQFHLMLDEFF
Cat- Aph3′* (*denotes D208A active site mutation) nucleic acid sequence
(SEQ ID NO: 669)
ATGGAGAAAAAAATCACTGGATATACCACCGTTGATATATCCCAATGGCATCGTAAAGAACATTTTGAGGCAT
TTCAGTCAGTTGCTCAATGTACCTATAACCAGACCGTTCAGCTGGATATTACGGCCTTTTTAAAGACCGTAAA
GAAAAATAAGCACAAGTTTTATCCGGCCTTTATTCACATTCTTGCCCGCCTGATGAATGCTCATCCGGAGTTC
CGTATGGCAATGAAAGACGGTGAGCTGGTGATATGGGATAGTGTTCACCCTTGTTACACCGTTTTCCATGAGC
AAACTGAAACGTTTTCATCGCTCTGGAGTGAATACCACGACGATTTCCGGCAGTTTCTACACATATATTCGCA
AGATGTGGCGTGTTACGGTGAAAACCTGGCCTATTTCCCTAAAGGGTTTATTGAGAATATGTTTTTCGTCTCA
GCCAATCCCTGGGTGAGTTTCACCAGTTTTGATTTAAACGTGGCCAATATGGACAACTTCTTCGCCCCCGTTT
TCACTATGGGCAAATATTATACGCAAGGCGACAAGGTGCTGATGCCGCTGGCGATTCAGGTTCATCATGCCGT
TTGTGATGGCTTCCATGTCGGCAGAATGCTTAATGAATTACAACAGTACTGCGATGAGTGGCAGGGCGGGGCG
GGCAGCGGTTCTGGCTCCAGCCATATTCAACGGGAAACGTCTTGCTCGAGGCCGCGATTAAATTCCAACATGG
ATGCTGATTTATATGGGTATAAATGGGCTCGCGATAATGTCGGGCAATCAGGTGCGACAATCTATCGATTGTA
TGGGAAGCCCGATGCGCCAGAGTTGTTTCTGAAACATGGCAAAGGTAGCGTTGCCAATGATGTTACAGATGAG
ATGGTCAGACTAAACTGGCTGACGGAATTTATGCCTCTTCCGACCATCAAGCATTTTATCCGTACTCCTGATG
ATGCATGGTTACTCACCACTGCGATCCCCGGGAAAACAGCATTCCAGGTATTAGAAGAATATCCTGATTCAGG
TGAAAATATTGTTGATGCGCTGGCAGTGTTCCTGCGCCGGTTGCATTCGATTCCTGTTTGTAATTGTCCTTTT
AACAGCGATCGCGTATTTCGTCTCGCTCAGGCGCAATCACGAATGAATAACGGTTTGGTTGATGCGAGTGATT
TTGATGACGAGCGTAATGGCTGGCCTGTTGAACAAGTCTGGAAAGAAATGCATAAGCTTTTGCCATTCTCACC
GGATTCAGTCGTCACTCATGGTGATTTCTCACTTGATAACCTTATTTTTGACGAGGGGAAATTAATAGGTTGT
ATTGCTGTTGGACGAGTCGGAATCGCAGACCGATACCAGGATCTTGCCATCCTATGGAACTGCCTCGGTGAGT
TTTCTCCTTCATTACAGAAACGGCTTTTTCAAAAATATGGTATTGATAATCCTGATATGAATAAATTGCAGTT
TCATTTGATGCTCGATGAGTTTTTCTAA
Cat- Aph3'* (*denotes D208A active site mutation) amino acid sequence
(SEQ ID NO: 670)
MEKKITGYTTVDISQWHRKEHFEAFQSVAQCTYNQTVQLDITAFLKTVKKNKHKFYPAFIHILARLMNAHPEF
RMAMKDGELVIWDSVHPCYTVFHEQTETFSSLWSEYHDDFRQFLHIYSQDVACYGENLAYFPKGFIENMFFVS
ANPWVSFTSFDLNVANMDNFFAPVFTMGKYYTQGDKVLMPLAIQVHHAVCDGFHVGRMLNELQQYCDEWQGGA
GSGSGSSHIQRETSCSRPRLNSNMDADLYGYKWARDNVGQSGATIYRLYGKPDAPELFLKHGKGSVANDVTDE
MVRLNWLTEFMPLPTIKHFIRTPDDAWLLTTAIPGKTAFQVLEEYPDSGENIVDALAVFLRRLHSIPVCNCPF
NSDRVFRLAQAQSRMNNGLVDASDFDDERNGWPVEQVWKEMHKLLPFSPDSVVTHGDFSLDNLIFDEGKLIGC
IAVGRVGIADRYQDLAILWNCLGEFSPSLQKRLFQKYGIDNPDMNKLQFHLMLDEFF

[0259] In some embodiments, the origin of replication (ORI) comprises a nucleic acid sequence suitable for use in a prokaryotic system. In some embodiments, the origin of replication (ORI) comprises a bacterial origin of replication sequence. In some embodiments, the origin of replication comprises a CloDF13, CloE1, pSC101, pMB1, pBR322, ColE1, pUC, RSF1030, or p15A origin of replication sequence. In some embodiments, the origin of replication comprises a pUC origin of replication sequence. In some embodiments, the origin of replication comprises a RSF1030 origin of replication sequence. In some embodiments, the origin of replication sequence comprises an origin of replication sequence shown in Table 3.

[0260] In some embodiments, the recording plasmid comprises a promoter. In some embodiments, the promoter is a constitutive promoter. In some embodiments, the constitutive promoter is a BAD promoter. In some embodiments, the promoter is selected from the promoters shown in Table 7.

[0261] In other embodiments, the target sequence is present in a recording locus. In some embodiments, the recording locus is located in a safe harbor locus. In some embodiments, the safe harbor locus is located in the CCR5 gene. In some embodiments, the CCR5 gene is a human CCR5 gene.

### Cell Data Recorder Systems

[0262] Some aspects of the disclosure provide a cell data recording system for use in a prokaryotic cell comprising any of the writing plasmids described herein in combination with one or more of the recording plasmids described herein. In other aspects, the disclosure provides a cell data recording system for use in a eukaryotic system comprising any of the writing plasmids described herein designed to target a recording locus (e.g., a locus in the genome of a cell) in a eukaryotic cell. In some embodiments, the writing plasmid provides a nucleic acid programmable DNA binding protein (e.g., a Cas9 domain) or a fusion protein (e.g., a fusion protein comprising a nucleic acid programmable DNA binding protein and a nucleic acid editing domain, e.g., base editor) that induces changes in cellular DNA (e.g., double-strand breaks, nucleobase editing) when operably linked to promoters that sense the presence of one or more stimuli or cell state changes. When coupled with one or more of the recording plasmids described herein, the writing plasmid induces a measurable change (e.g., double-strand breaks, nucleobase editing) in a target sequence within one of or more of the recording plasmids in response to a stimulus or set of stimuli. In contrast to digital memory devices that store information (e.g., the presence or absence of a stimulus) in one of two distinct states (i.e., “on” or “off”), these cell data recorders induce permanent marks in cellular DNA in a manner that reflects both the strength (i.e., amplitude) and duration of one or more stimuli. In addition, the writing plasmids and recording plasmids described herein can be employed in multiple different combinations depending on the desired stimulus or set of stimuli to be measured and recorded. That is, in addition to being able to measure a single stimulus, these writing plasmids and recording plasmids provide a multiplexable system for measuring cell states. Thus, in some aspects, provided herein are analog, multi-event cell data recording systems (also referred to as a “CRISPR-mediated analog multi-event recording apparatus” or “CAMERA”) that have the ability to simultaneously record multiple cell states, including, for example, exposure to stimuli such as antibiotics, nutrients, viruses, light, and cellular signaling cascades. Importantly, these cell data recorders employ modern high-throughput sequencing technologies to measure readout (e.g., changes in cellular DNA) and are not dependent on large cell populations for both recording of stimuli or readout of the changes in cellular DNA induced by these stimuli.

[0263] In one aspect, provided herein is a cell data recorder system for use in a prokaryotic cell comprising: (a) a writing plasmid suitable for use in a prokaryotic cell described herein; (b) a first recording plasmid selected from the recording plasmids provided herein; and (c) a second recording plasmid selected from the recording plasmids provided herein. In some embodiments, the first recording plasmid and the second recording plasmid are not the same. In some embodiments, the cell data recorder system is selected from those shown in Table 2.

[0264] In some embodiments, the writing plasmid comprises: (i) a nucleic acid sequence encoding a nucleic acid programmable DNA binding protein (napDNAbp) operably linked to a promoter; and (ii) an origin of replication. In some embodiments, the writing plasmid comprises: (i) a nucleic acid sequence encoding (a) a nucleic acid programmable DNA binding protein (napDNAbp) and (b) a single guide RNA (sgRNA), wherein the nucleic acid sequence of (i) is operably linked to a promoter; and (ii) an origin of replication. In some embodiments, the writing plasmid comprises: (i) a nucleic acid sequence encoding a nucleic acid programmable DNA binding protein (napDNAbp) operably linked to a first promoter; (ii) a nucleic acid sequence encoding a single guide RNA (sgRNA) operably linked to a second promoter; and (iii) an origin of replication. In some embodiments, the writing plasmid comprises: (i) a nucleic acid sequence encoding a nucleic acid programmable DNA binding protein (napDNAbp) operably linked to a first promoter; (ii) a nucleic acid sequence encoding a first single guide RNA (sgRNA) operably linked to a second promoter; (iii) a nucleic acid sequence encoding a second single guide RNA (sgRNA) operably linked to a third promoter; and (iii) an origin of replication.

[0265] In some embodiments, the cell data recorder system comprises: (a) a writing plasmid comprising: (i) a nucleic acid sequence encoding a napDNAbp operably linked to an inducible promoter, (ii) a nucleic acid sequence encoding a sgRNA operably linked to a constitutive promoter, wherein the sgRNA is complementary to a target sequence, and (iii) an origin of replication; (b) a first recording plasmid comprising a target sequence; and (c) a second recording plasmid comprising a reporter gene comprising a nucleic acid sequence that encodes a reporter protein, such as an EFGP variant. In some embodiments, the sgRNA is constitutively expressed. In some embodiments, the sgRNA associates with the napDNAbp under conditions (e.g., a stimulus) that induce the expression of the napDNAbp. In some embodiments, the inducible promoter is an anhydrotetracycline-inducible promoter. In some embodiments, the constitutive promoter is a constitutive Lac promoter. In some embodiments, the target sequence is present in a reporter gene comprising a nucleic acid sequence that encodes a full-length EFGP protein. In some embodiments, the full-length EFGP protein comprises the amino acid sequence of SEQ ID NO: 660. In some embodiments, the EGFP variant comprises the amino acid sequence of SEQ ID NOS 661 and 866.

[0266] In some embodiments, the cell data recorder system comprises: (a) a writing plasmid comprising: (i) a nucleic acid sequence encoding a napDNAbp operably linked to a first inducible promoter, (ii) a nucleic acid sequence encoding a sgRNA operably linked to a second inducible promoter, wherein the sgRNA is complementary to a target sequence, and (iii) an origin of replication; (b) a first recording plasmid comprising a target sequence; and (c) a second recording plasmid comprising a reporter gene comprising a nucleic acid sequence that encodes an EFGP variant. In some embodiments, the sgRNA associates with the napDNAbp under conditions (e.g., a stimulus) that induce the expression of the sgRNA and the expression of the napDNAbp. In some embodiments, the first inducible promoter is an anhydrotetracycline-inducible promoter. In some embodiments, the second inducible promoter is an IPTG-promoter. In some embodiments, the target sequence is present in a reporter gene comprising a nucleic acid sequence that encodes a full-length EFGP protein. In some embodiments, the full-length EFGP protein comprises the amino acid sequence of SEQ ID NO: 600. In some embodiments, the EGFP variant comprises the amino acid sequence of SEQ ID NOS 661 and 866.

[0267] In some embodiments, the cell data recorder system comprises: (a) a writing plasmid comprising (i) a nucleic acid sequence encoding a napDNAbp operably linked to a first inducible promoter, (ii) a nucleic acid sequence encoding a sgRNA operably linked to a second inducible promoter, wherein the sgRNA is complementary to a target sequence, and (iii) an origin of replication; (b) a first recording plasmid comprising a target sequence; and (c) a second recording plasmid comprising a reporter gene comprising a nucleic acid sequence that encodes an EFGP variant. In some embodiments, the sgRNA associates with the napDNAbp under conditions (e.g., a stimulus) that induce the expression of the sgRNA and the expression of the napDNAbp. In some embodiments, the first inducible promoter is an anhydrotetracycline-inducible promoter. In some embodiments, the second inducible promoter is an IPTG-promoter. In some embodiments, the target sequence is present in a reporter gene comprising a nucleic acid sequence that encodes a full-length EFGP protein. In some embodiments, the full-length EFGP protein comprises the amino acid sequence of SEQ ID NO: 600. In some embodiments, the EGFP variant comprises the amino acid sequence of SEQ ID NOS 661 and 866. In some embodiments, the first recording plasmid further comprises (i) a nucleic acid sequence encoding a Cat variant comprising a H195A mutation in the amino acid sequence provided by SEQ ID NO: P1, wherein the H195A mutation results in a Cat protein that does not confer chloramphenicol resistance, and (ii) a nucleic acid sequence encoding aminoglycoside-3′-phosphotransferase (Aph3′), wherein the Aph3′ protein confers kanamycin resistance. In some embodiments, the first recording plasmid comprises the nucleic acid sequence of SEQ ID NO: 667. In some embodiments, the second recording plasmid further comprises (i) a nucleic acid sequence encoding chloramphenicol acetyltransferase (Cat), and wherein the Cat protein confers chloramphenicol resistance, and (ii) a nucleic acid sequence encoding a Aph3′ protein comprising a D208A mutation in the amino acid sequence provided by SEQ ID NO: P2, and wherein the D208A mutation results in a Aph3′ protein that does not confer kanamycin resistance. In some embodiments, the second recording plasmid comprises the nucleic acid sequence of SEQ ID NO: 669.

[0268] In some embodiments, the cell data recorder system comprises: (a) a writing plasmid comprising (i) a nucleic acid sequence encoding a napDNAbp operably linked to a first inducible promoter, (ii) a nucleic acid sequence encoding a first sgRNA operably linked to a second inducible promoter, wherein the first sgRNA is complementary to a target sequence, (iii) a nucleic acid sequence encoding a second sgRNA operably linked to a third inducible promoter, wherein the second sgRNA is complementary to a target sequence, and (iv) an origin of replication; (b) a first recording plasmid comprising a target sequence complementary to the first sgRNA; and (c) a second recording plasmid comprising target sequence complementary to the second sgRNA. In some embodiments, the first sgRNA associates with the napDNAbp only under conditions (e.g., a stimulus or set of stimuli) that induce the expression of the first sgRNA and expression of the napDNAbp. In some embodiments, the second sgRNA associates with the napDNAbp only under conditions (e.g., a stimulus or set of stimuli) that induce the expression of the second sgRNA and expression of the napDNAbp. In some embodiments, the first inducible promoter is an anhydrotetracycline-inducible promoter. In some embodiments, the second inducible promoter is an IPTG-inducible promoter. In some embodiments, the third inducible promoter is a rhamnose-inducible promoter. In some embodiments, the target sequence complementary to the first sgRNA is present in a reporter gene comprising a nucleic acid sequence that encodes a full-length EFGP protein. In some embodiments, the full-length EFGP protein comprises the amino acid sequence of SEQ ID NO: 660. In some embodiments, the target sequence complementary to the first sgRNA is present in a reporter gene comprising a nucleic acid sequence that encodes an EFGP variant. In some embodiments, the EGFP variant comprises the amino acid sequence of SEQ ID NOS 661 and 866. In some embodiments, the first recording plasmid further comprises (i) a nucleic acid sequence encoding a Cat variant comprising a H195A mutation in the amino acid sequence provided by SEQ ID NO: P1, wherein the H195A mutation results in a Cat protein that does not confer chloramphenicol resistance, and (ii) a nucleic acid sequence encoding aminoglycoside-3′-phosphotransferase (Aph3′), wherein the Aph3′ protein confers kanamycin resistance. In some embodiments, the first recording plasmid comprises the nucleic acid sequence of SEQ ID NO: 667. In some embodiments, the second recording plasmid further comprises (i) a nucleic acid sequence encoding chloramphenicol acetyletransferase (Cat), and wherein the Cat protein confers chloramphenicol resistance, and (ii) a nucleic acid sequence encoding a Aph3′ protein comprising a D208A mutation in the amino acid sequence provided by SEQ ID NO: P2, and wherein the D208A mutation results in a Aph3′ protein that does not confer kanamycin resistance. In some embodiments, the second recording plasmid comprises the nucleic acid sequence of SEQ ID NO: 669.

[0269] In another aspect, provided herein is a cell data recorder system for use in a prokaryotic cell comprising: (a) a writing plasmid suitable for use in a prokaryotic cell described herein; and (b) one or more recording plasmid selected from the recording plasmids provided herein. In some embodiments, the cell data recorder system comprises one recording plasmid. In some embodiments, the cell data recorder system is selected from those shown in Table 2.

[0270] In some embodiments, the writing plasmid comprises: (i) a nucleic acid sequence encoding a fusion protein comprising a nucleic acid programmable DNA binding protein (napDNAbp) and a nucleic acid editing domain operably linked to a promoter; and (ii) an origin of replication. In some embodiments, the writing plasmid comprises: (i) a nucleic acid sequence encoding (a) a fusion protein comprising a nucleic acid programmable DNA binding protein (napDNAbp) and a nucleic acid editing domain and (b) a single guide RNA (sgRNA), wherein the nucleic acid sequence of (i) is operably linked to a promoter; and (ii) an origin of replication. In some embodiments, the writing plasmid comprises: (i) a nucleic acid sequence encoding a fusion protein comprising a nucleic acid programmable DNA binding protein (napDNAbp) and a nucleic acid editing domain operably linked to a first promoter; (ii) a nucleic acid sequence encoding a single guide RNA (sgRNA) operably linked to a second promoter; and (iii) an origin of replication. In some embodiments, the writing plasmid comprises: (i) a nucleic acid sequence encoding a fusion protein comprising a nucleic acid programmable DNA binding protein (napDNAbp) and a nucleic acid editing domain operably linked to a first promoter; (ii) a nucleic acid sequence encoding a first single guide RNA (sgRNA) operably linked to a second promoter; (iii) a nucleic acid sequence encoding a second single guide RNA (sgRNA) operably linked to a third promoter; and (iv) an origin of replication. In some embodiments, the writing plasmid comprises: (i) a nucleic acid sequence encoding a fusion protein comprising a nucleic acid programmable DNA binding protein (napDNAbp) and a nucleic acid editing domain operably linked to a first promoter; (ii) a nucleic acid sequence encoding a first single guide RNA (sgRNA) operably linked to a second promoter; (iii) a nucleic acid sequence encoding a second single guide RNA (sgRNA) operably linked to a third promoter; (iv) a nucleic acid sequence encoding a third single guide RNA (sgRNA) operably linked to a fourth promoter; and (iv) an origin of replication.

[0271] In some embodiments, the cell data recorder system comprises: (a) a writing plasmid comprising (i) a nucleic acid sequence encoding a fusion protein comprising a napDNAbp and a nucleic acid editing domain operably linked to an inducible promoter, (ii) a nucleic acid sequence encoding a sgRNA operably linked to a constitutive promoter, wherein the sgRNA is complementary to a target sequence, and (iii) an origin of replication; and (b) a recording plasmid comprising a target sequence. In some embodiments, the sgRNA is constitutively expressed. In some embodiments, the sgRNA associates with the napDNAbp under conditions (e.g., a stimulus) that induce the expression of the fusion protein. In some embodiments, the inducible promoter is an anhydrotetracycline-inducible promoter. In some embodiments, the constitutive promoter is a constitutive Lac promoter. In some embodiments, the target sequence is present in a reporter gene comprising a nucleic acid sequence that encodes a full-length EFGP protein. In some embodiments, the full-length EFGP protein comprises the amino acid sequence of SEQ ID NO: 660.

[0272] In some embodiments, the cell data recorder system comprises: (a) a writing plasmid comprising (i) a nucleic acid sequence encoding a fusion protein comprising a napDNAbp and a nucleic acid editing domain operably linked to a first inducible promoter, (ii) a nucleic acid sequence encoding a sgRNA operably linked to a second inducible promoter, wherein the sgRNA is complementary to a target sequence, and (iii) an origin of replication; and (b) a recording plasmid comprising a target sequence. In some embodiments, the sgRNA associates with the napDNAbp only under conditions (e.g., a stimulus or set of stimuli) that induce the expression of the fusion protein and expression of the sgRNA. In some embodiments, the first inducible promoter is an anhydrotetracycline-inducible promoter. In some embodiments, the second inducible promoter is an IPTG-inducible promoter. In some embodiments, the target sequence is present in a reporter gene comprising a nucleic acid sequence that encodes a full-length EFGP protein. In some embodiments, the full-length EFGP protein comprises the amino acid sequence of SEQ ID NO: 660.

[0273] In some embodiments, the cell data recorder system comprises: (a) a writing plasmid comprising (i) a nucleic acid sequence encoding a fusion protein comprising a napDNAbp and a nucleic acid editing domain operably linked to a first inducible promoter, (ii) a nucleic acid sequence encoding a sgRNA operably linked to a second inducible promoter, wherein the sgRNA is complementary to a target sequence, and (iii) an origin of replication; and (b) a recording plasmid comprising a target sequence. In some embodiments, the sgRNA associates with the napDNAbp only under conditions (e.g., a stimulus or set of stimuli) that induce the expression of the fusion protein and expression of the sgRNA. In some embodiments, the first inducible promoter is an anhydrotetracycline-inducible promoter. In some embodiments, the second inducible promoter is an arabinose-inducible promoter. In some embodiments, the target sequence is present in a reporter gene comprising a nucleic acid sequence that encodes a full-length EFGP protein. In some embodiments, the full-length EFGP protein comprises the amino acid sequence of SEQ ID NO: 660.

[0274] In some embodiments, the cell data recorder system comprises: (a) a writing plasmid comprising (i) a nucleic acid sequence encoding a fusion protein comprising a napDNAbp and a nucleic acid editing domain operably linked to a first inducible promoter, (ii) a nucleic acid sequence encoding a sgRNA operably linked to a second inducible promoter, wherein the sgRNA is complementary to a target sequence, and (iii) an origin of replication; and (b) a recording plasmid comprising a target sequence. In some embodiments, the sgRNA associates with the napDNAbp only under conditions (e.g., a stimulus or set of stimuli) that induce the expression of the fusion protein and expression of the sgRNA. In some embodiments, the first inducible promoter is an anhydrotetracycline-inducible promoter. In some embodiments, the second inducible promoter is a rhamnose-inducible promoter. In some embodiments, the target sequence is present in a reporter gene comprising a nucleic acid sequence that encodes a full-length EFGP protein. In some embodiments, the full-length EFGP protein comprises the amino acid sequence of SEQ ID NO: 660.

[0275] In some embodiments, the cell data recorder system comprises: (a) a writing plasmid comprising (i) a nucleic acid sequence encoding a fusion protein comprising a napDNAbp and a nucleic acid editing domain operably linked to a first inducible promoter, (ii) a nucleic acid sequence encoding a sgRNA operably linked to a second inducible promoter, wherein the sgRNA is complementary to a target sequence, and (iii) an origin of replication; and (b) a recording plasmid comprising a target sequence. In some embodiments, the sgRNA associates with the napDNAbp only under conditions (e.g., a stimulus or set of stimuli) that induce the expression of the fusion protein and expression of the sgRNA. In some embodiments, the first inducible promoter is an anhydrotetracycline-inducible promoter. In some embodiments, the second inducible promoter is a phage shock promoter (PSP). In some embodiments, expression of the sgRBA is induced by the presence of a phage. In some embodiments, the target sequence is present in a reporter gene comprising a nucleic acid sequence that encodes a full-length EFGP protein. In some embodiments, the full-length EFGP protein comprises the amino acid sequence of SEQ ID NO: 660.

[0276] In some embodiments, the cell data recorder system comprises: (a) a writing plasmid comprising (i) a nucleic acid sequence encoding a fusion protein comprising a napDNAbp and a nucleic acid editing domain operably linked to a first inducible promoter, (ii) a nucleic acid sequence encoding a sgRNA operably linked to a second inducible promoter, wherein the sgRNA is complementary to a target sequence, and (iii) an origin of replication; and (b) a recording plasmid comprising a target sequence. In some embodiments, the sgRNA associates with the napDNAbp only under conditions (e.g., a stimulus or set of stimuli) that induce the expression of the fusion protein and expression of the sgRNA. In some embodiments, the first inducible promoter is a light-inducible promoter. In some embodiments, expression of the fusion protein is induced in the presence of light, wherein the light inhibits the binding of a repressor to the first inducible promoter. In some embodiments, the second inducible promoter is an IPTG-inducible promoter. In some embodiments, the target sequence is present in a reporter gene comprising a nucleic acid sequence that encodes a full-length EFGP protein. In some embodiments, the full-length EFGP protein comprises the amino acid sequence of SEQ ID NO: 660.

[0277] In some embodiments, the cell data recorder system comprises: (a) a writing plasmid comprising (i) a nucleic acid sequence encoding a fusion protein comprising a napDNAbp and a nucleic acid editing domain operably linked to a first inducible promoter, (ii) a nucleic acid sequence encoding a first sgRNA operably linked to a second inducible promoter, wherein the first sgRNA is complementary to a first target sequence, (iii) a nucleic acid sequence encoding a second sgRNA operably linked to a third inducible promoter, wherein the second sgRNA is complementary to a second target sequence, and (iv) an origin of replication; and (b) a recording plasmid comprising a target sequence. In some embodiments, the first sgRNA associates with the napDNAbp only under conditions (e.g., a stimulus or set of stimuli) that induce the expression of the fusion protein and the expression of the first sgRNA. In some embodiments, the second sgRNA associates with the napDNAbp only under conditions (e.g., a stimulus or set of stimuli) that induce the expression of the fusion protein and the expression of the second sgRNA. In some embodiments, the first inducible promoter is an anhydrotetracycline-inducible promoter. In some embodiments, the second inducible promoter is an arabinose-inducible promoter. In some embodiments, the third inducible promoter is a rhamnose-inducible promoter. In some embodiments, the first sgRNA and the second sgRNA are complementary to different target sequences. In some embodiments, the second target sequence is generated by a change in the first target sequence. In some embodiments, the change in the first target sequence is induced by the fusion protein under conditions (e.g., a stimulus or set of stimuli) that induce the expression of the fusion protein and the first sgRNA. In some embodiments, the first target sequence is present in a nucleic acid sequence comprising an EGFP gene with one or more insertions, deletions, or mutations relative to the nucleic acid sequence of the wild-type EGFP gene. In some embodiments, the EGFP gene comprises an insertion between codon 115 and codon 135 (EGFP-115-135insertion) and a T206G mutation (EGFP-115-135insertion, T206G) relative to the nucleic acid sequence of the wild-type EGFP gene. In some embodiments, the EGFP gene comprises the nucleic acid sequence of SEQ ID NO: 652. In some embodiments, the EGFP gene encodes an EGFP protein comprising the amino acid sequence of SEQ ID NO: 662.

[0278] In some embodiments, the cell data recorder system comprises: (a) a writing plasmid comprising (i) a nucleic acid sequence encoding a fusion protein comprising a napDNAbp and a nucleic acid editing domain operably linked to a first inducible promoter, (ii) a nucleic acid sequence encoding a first sgRNA operably linked to a second inducible promoter, wherein the first sgRNA is complementary to a first target sequence, (iii) a nucleic acid encoding a second sgRNA operably linked to a third inducible promoter, wherein the second sgRNA is complementary to a second target sequence, (iv) a nucleic acid molecule encoding a third sgRNA operably linked to a fourth inducible promoter, wherein the third sgRNA is complementary to a third target sequence, and (v) an origin of replication; and (b) a recording plasmid comprising a target sequence. In some embodiments, the first sgRNA associates with the napDNAbp only under conditions (e.g., a stimulus or set of stimuli) that induce the expression of the fusion protein and the first sgRNA. In some embodiments, the second sgRNA associates with the napDNAbp only under conditions (e.g., a stimulus or set of stimuli) that induce the expression of the fusion protein and the second sgRNA. In some embodiments, the third sgRNA associates with the napDNAbp only under conditions (e.g., a stimulus or set of stimuli) that the expression of the fusion protein and the third sgRNA. In some embodiments, the first inducible promoter is an anhydrotetracycline-inducible promoter. In some embodiments, the second inducible promoter is an IPTG-inducible promoter. In some embodiments, the third inducible promoter is an arabinose-inducible promoter. In some embodiments, and the fourth inducible promoter is a rhamnose-inducible promoter. In some embodiments, the first target sequence, the second target sequence, and/or the third target sequence is present in a reporter gene comprising a nucleic acid sequence that encodes a full-length EFGP protein. In some embodiments, the first target sequence, the second target sequence, and the third target sequence are not the same target sequence. In some embodiments, the full-length EFGP protein comprises the amino acid sequence of SEQ ID NO: 600.

[0279] In yet another aspect, provided herein is a cell data recorder system for use in a eukaryotic cell comprising: (a) a writing plasmid suitable for use in a eukaryotic cell described herein; and (b) one or more recording loci comprising a target sequence. In some embodiments, the target sequence is complementary to an sgRNA expressed in the cell. In some embodiments, the one or more of the recording loci are located in a safe harbor locus. In some embodiments, the safe harbor locus is located in the CCR5 gene. In some embodiments, the CCR5 gene is a human CCR5 gene. In some embodiments, the cell data recorder system is selected from those shown in Table 2.

[0280] In some embodiments, the writing plasmid comprises: (i) a nucleic acid sequence encoding a fusion protein comprising a nucleic acid programmable DNA binding protein (napDNAbp) and a nucleic acid editing domain operably linked to a promoter; and (ii) an origin of replication. In some embodiments, the writing plasmid comprises: (i) a nucleic acid sequence encoding (a) a fusion protein comprising a nucleic acid programmable DNA binding protein (napDNAbp) and a nucleic acid editing domain and (b) a single guide RNA (sgRNA), wherein the nucleic acid sequence of (i) is operably linked to a promoter; and (ii) an origin of replication. In some embodiments, the writing plasmid comprises: (i) a nucleic acid sequence encoding a fusion protein comprising a nucleic acid programmable DNA binding protein (napDNAbp) and a nucleic acid editing domain operably linked to a first promoter; (ii) a nucleic acid sequence encoding a single guide RNA (sgRNA) operably linked to a second promoter; and (iii) an origin of replication.

[0281] In some embodiments, the cell data recorder system comprises: (a) a writing plasmid comprising (i) a nucleic acid sequence encoding a fusion protein comprising a napDNAbp and a nucleic acid editing domain operably linked to a first constitutive promoter, and (ii) an origin of replication; and (b) one or more recording loci comprising a target sequence. In some embodiments, the cell data recorder system further comprises: (c) a second plasmid comprising a nucleic acid encoding a first sgRNA operably liked to a second constitutive promoter, wherein the first sgRNA is complementary to a first target sequence In some embodiments, the cell data recorder system further comprises: (d) a third plasmid comprising a nucleic acid encoding a second sgRNA operably liked to a third constitutive promoter, wherein the second sgRNA is complementary to a second target sequence. In some embodiments, the cell data recorder system further comprises: (e) a fourth plasmid comprising a nucleic acid encoding a third sgRNA operably liked to a fourth constitutive promoter, wherein the third sgRNA is complementary to a third target sequence. In some embodiments, the fusion protein is constitutively expressed. In some embodiments, the fusion protein and the first sgRNA are constitutively expressed, and the first sgRNA associates with the napDNAbp. In some embodiments, the fusion protein and the second sgRNA are constitutively expressed, and the second sgRNA associates with the napDNAbp. In some embodiments, the fusion protein and the third sgRNA are constitutively expressed, and the third sgRNA associates with the napDNAbp. In some embodiments, the first, second, and third sgRNAs are not identical. In some embodiments, the first, second, and third sgRNAs are each independently complementary to a different target sequence. In some embodiments, any one of the first, second, third, and/or fourth constitutive promoter is selected from the constitutive promoters listed in Table 8. In some embodiments, the first constitutive promoter is a CMV promoter. In some embodiments, the second, third, and/or fourth constitutive promoters are different. In some embodiments, the second, third, and/or fourth constitutive promoters are the same. In some embodiments, the second, third, and/or fourth constitutive promoter comprises a U6 promoter sequence. In some embodiments, any one of the first, second, third, and/or fourth promoters can be an inducible promoter. In some embodiments, the inducible promoter is selected from a inducible promoter listed in Table 8 or Table 10. In some embodiments, the one or more of the recording loci are located in a safe harbor locus. In some embodiments, the safe harbor locus is located in the CCR5 gene. In some embodiments, the CCR5 gene is a human CCR5 gene.

[0282] In some embodiments, the cell data recorder system comprises: (a) a writing plasmid comprising (i) a nucleic acid sequence encoding a fusion protein comprising a napDNAbp and a nucleic acid editing domain operably linked to an inducible promoter, (ii) a nucleic acid encoding a sgRNA operably liked to a constitutive promoter, wherein the sgRNA is complementary to a target sequence, and (iii) an origin of replication; and (b) one or more recording loci comprising a target sequence. In some embodiments, the sgRNA is constitutively expressed and associates with the napDNAbp under conditions (e.g., a stimulus or set of stimuli) that induce the expression of the fusion protein. In some embodiments, the inducible promoter is a tetracycline-inducible promoter. In some embodiments, the stimulus that induces the expression of the fusion protein is doxycycline. In some embodiments, the constitutive promoter is a constitutive U6 promoter. In some embodiments, the recording locus is located in a safe harbor locus. In some embodiments, the safe harbor locus is located in the CCR5 gene. In some embodiments, the CCR5 gene is a human CCR5 gene.

[0283] In some embodiments, the cell data recorder system comprises: (a) a writing plasmid comprising (i) a nucleic acid sequence encoding a fusion protein comprising a napDNAbp and a nucleic acid editing domain operably linked to an inducible promoter, (ii) a nucleic acid encoding a sgRNA operably liked to a constitutive promoter, wherein the sgRNA is complementary to a target sequence, and (iii) an origin of replication. In some embodiments, the sgRNA is constitutively expressed and associates with the napDNAbp under conditions (e.g., a stimulus or set of stimuli) that induce the expression of the fusion protein. In some embodiments, the inducible promoter is a induced by a signaling molecule produced during the activation of an endogenous or an exogenous signaling cascade. In some embodiments, the endogenous signaling cascade is the Wnt signaling cascade. In some embodiments, the signaling molecule produced during an activated Wnt signaling cascade is beta-catenin. In some embodiments, the stimulus that induces the expression of the fusion protein is beta-catenin. In certain embodiments, the endogenous signaling cascade is, for example, an NF-κB, SMADs, STAT1, STAT2, STAT3, IRF-1, or E2F cascade. In some such embodiments, the stimulus is a cytokine or growth factor such as TNF, TGF-β, IL-6, IFNβ, IFNγ, or EGF. In some embodiments, the signaling cascade is, for example, a CREB, C/EBP, SRF, NFAT, GR, MAPK/JNK, GATA, RAR, RXR, VDR, ARE, or a XRE/DRE cascade. In certain such embodiments the stimulus is a small molecule such as forskolin, LiCl, PMA, dexamethasone, ATRA, calcitriol, sulforaphane, or TCDD. In some embodiments, the signaling cascade is an HSF, ATF6, or CBF/NF-Y/YY1 cascade. In some embodiments, the constitutive promoter is a constitutive U6 promoter. In some embodiments, the nucleic acid sequence of (i) or (ii) further comprises a nucleic acid sequence encoding a second protein. In some embodiments, the nucleic acid sequence of (i) further comprises a nucleic acid sequence encoding a second protein. In some embodiments, the second protein is luciferase. In some embodiments, the nucleic acid sequence encoding the reporter protein is connected to the 3′ end of the nucleic acid sequence of (i) by an intervening P2A sequence. In some embodiments, the recording locus is located in a safe harbor locus. In some embodiments, the safe harbor locus is located in the CCR5 gene. In some embodiments, the CCR5 gene is a human CCR5 gene.

[0284] In some embodiments, the cell data recorder system comprises: (a) a writing plasmid comprising: (i) a nucleic acid sequence encoding a fusion protein comprising a nucleic acid programmable DNA binding protein (napDNAbp) and a nucleic acid editing domain operably linked to a first constitutive promoter; and (ii) an origin of replication; and (b) one or more additional plasmids comprising a nucleic acid sequence encoding a sgRNA. In some embodiments, the cell data recorder system further comprises (c) a second plasmid comprising a nucleic acid sequence encoding a first sgRNA operably linked to a second constitutive promoter comprising a first repressor binding site, wherein the first sgRNA is complementary to a first target sequence; and (d) a third plasmid comprising a nucleic acid sequence encoding one or more repressor proteins operably linked to a third constitutive promoter. In some embodiments, the repressor protein and first sgRNA are constitutively expressed, and the repressor protein binds to the repressor binding site of the second constitutive promoter. In some embodiments, the nucleic acid sequence of (c) encodes one repressor protein. In some embodiments, the repressor protein is a tetracycline repressor protein (Tet_{R}) or a lactose repressor protein (LacI). In some embodiments, the nucleic acid sequence of (c) encodes a first repressor protein and a second repressor protein, wherein an intervening P2A sequence separates the nucleic acid sequences encoding the first and second repressor proteins. In some embodiments, the first repressor protein or the second repressor protein is a tetracycline repressor protein (Tet_{R}). In some embodiments, the first repressor protein or the second repressor protein is a lactose repressor protein (LacI). In some embodiments, the first repressor protein and the second repressor protein are not the same. In some embodiments, the first repressor protein is a lactose repressor protein (LacI). In some embodiments, the lactose repressor protein cannot bind to the first repressor binding site in the presence of IPTG. In some embodiments, the second repressor protein is a tetracycline repressor protein (Tet_{R}). In some embodiments, the tetracycline repressor protein cannot bind to the second repressor binding site in the presence of tetracycline, or a derivative thereof. In some embodiments, the tetracycline, or derivative thereof, is doxycylcline. In some embodiments, the cell data recorder system further comprises (e) a fourth plasmid comprising a nucleic acid encoding a second sgRNA operably linked to a fourth constitutive promoter comprising a second repressor binding site, wherein the second sgRNA is complementary to a second target sequence, wherein the second repressor protein and the second sgRNA are constitutively expressed, and wherein the second repressor protein binds to the second repressor binding site of the fourth constitutive promoter. In some embodiments, the first constitutive promoter, the second constitutive promoter, and the third constitutive promoter, and/or the fourth constitutive promoter are selected from a CMV promoter, a U6 promoter, a H1 promoter, or a UBC promoter. In some embodiments, the first constitutive promoter, the second constitutive promoter, and the third constitutive promoter are selected from a constitutive promoter listed in Table 8. In some embodiments, the first constitutive promoter, the second constitutive promoter, the third constitutive promoter, and/or the fourth constitutive promoter are different constitutive promoters. In some embodiments, the first constitutive promoter is a CMV promoter. In some embodiments, the second constitutive promoter is a U6 promoter. In some embodiments, the third constitutive promoter is a UBC promoter. In some embodiments, the fourth constitutive promoter is a H1 promoter.

[0285] The description of exemplary embodiments of the cell data recorder systems above is provided for illustration purposes only and not meant to be limiting. Additional cell data recorder systems, e.g., variations of the exemplary systems described in detail above, are also embraced by this disclosure.

### Kits and Cells

[0286] Also provided herein are kits comprising one or more writing plasmids and/or recording plasmids described herein. Some aspects of this disclosure provide kits comprising a writing plasmid provided herein. In some embodiments, the kit further comprises one or more recording plasmids provided herein. In some embodiments, the kit further comprises one or more additional plasmids, wherein the additional plasmids provide one or more sgRNA sequences complementary to a target sequence of interest. In some embodiments, the kit comprises a writing plasmid provided herein, wherein the writing plasmid comprises one or more nucleic acid sequences encoding a sgRNA, wherein the sgRNA sequences is complementary to a target sequence of interest. In some embodiments, the kit comprises a cell data recorder system provided herein.

[0287] Some aspects of this disclosure provide cells comprising one or more writing plasmids and/or recording plasmids described herein. In some embodiments, the cell comprises any of the writing plasmids described herein. In some embodiments, the cell comprises one, two, three, four, five, six, seven, eight, nine, or ten of any of the writing plasmids described herein. In some embodiments, the cell comprises one or more recording plasmids described herein. In some embodiments, the cell comprises one, two, three, four, five, six, seven, eight, nine, or ten of any of the recording plasmids described herein. In some embodiments, the cell comprises any of the cell data recorder systems described herein. In some embodiments, the cell has been engineered to comprise one or more writing plasmids and/or recording plasmids described herein. In some embodiments, the cell has been engineered to comprise a cell data recording system described herein. In some embodiments, the cell is a eukaryotic cell. In some embodiments, the cell is from a human, mouse, rat, hamster monkey, dog, opossum, rabbit, zebrafish, or insect. Exemplary eukaryotic cells include, without limitation, cells from any one of the following cell lines: 3T3-L1, 4T1, 9L, A172, A20, A253, A2780, A2780ADR, A2780cis, A431, A549, AB9, AHL-1, ALC, B16, B35, BCP-1, BEAS-2B, bEnd.3, BHK-21, BOSC23, BT-20, BxPC3, C2C12, C3H-10T1/2, C6, C6/36, Caco-2, Cal-27, Calu-3, CGR8, CHO, CML T1, CMT12, COR-L23, COR-L23/5010, COR-L23/CPR, COR-L23/R23, COS-7, COV-434, CT26, D17, DAOY, DH82, DU145, DuCaP, E14Tg2a, EL4, EM-2, EM-3, EMT6/AR1, EMT6/AR10.0, FM3, GL261, H1299, HaCaT, HCA2, HEK 293, HEK 293T, HeLa, Hep G2, Hepalc1c7, High Five, HL-60, HT-1080, HT-29, J558L, Jurkat, JY, K562, KBM-7, KCL-22, KG1, Ku812, KYO-1, L1210, L243, LNCaP, MA-104, Ma-Mel 1, 2, 3 . . . 48, MA2.1, MC-38, MCF-10A, MCF-7, MDA-MB-157, MDA-MB-231, MDA-MB-361, MDA-MB-468, MDCK II, MG63, Mono-Mac-6, MOR/0.2R, MRC-5, MTD-1A, MyEnd, NALM-1, NCI-H69, NCI-H69/CPR, NCI-H69/LX10, NCI-H69/LX20, NCI-H69/LX4, Neuro-2a, Neuro2a, NIH-3T3, NK-92, NTERA-2, NW-145, OK, OPCN/OPCT cell lines, P3X63Ag8, PC-3, PC12, Peer, PNT1A, PNT2, Pt K2, Raji, RBL-1, RenCa, RIN-5F, RMA-S, S2, SaOS-2, Sf21, Sf9, SH-SY5Y, SiHa, SK-BR-3, SK-N-SH, SK-OV-3, T-47D, T2, T84, T98G, THP-1, U2OS, U373, U87, U937, VCaP, Vero, VG-1, WM39, WT-49, YAC-1, and YAR. In some embodiments, the eukaryotic cell is a mammalian cell. In some embodiments, the mammalian cell is a human cell (e.g., HEK293T). In some such embodiments, the cell is an immune cell such as a T cell. In certain embodiments, the engineered CAMERA-expressing T cell is capable of selecting and initiating one or more immunotherapeutic pathways by sensing disease indicators. Inflammation signal cascades and tumor cells provide stimulatory molecules and/or effect systemic and/or localized changes that are detected by CAMERA-expressing T cells. In some embodiments, the cell is a prokaryotic cell. In some embodiments, the prokaryotic cell is a bacterial cell. In some embodiments, the bacterial cell is a gram positive bacterial cell. In some embodiments, the bacterial cell is a gram negative bacterial cell. In some embodiments, the bacterial cell is an E. coli cell (e.g., S1030 cell or S2063 cell). Bacterial cells of the present disclosure include bacterial subdivisions of Eubacteria and Archaebacteria. Eubacteria can be further subdivided into gram-positive and gram-negative Eubacteria, which depend upon a difference in cell wall structure. Also included herein are those classified based on gross morphology alone (e.g., cocci, bacilli). In some embodiments, the bacterial cells are Gram-negative cells, and in some embodiments, the bacterial cells are Gram-positive cells. Examples of bacterial cells of the present disclosure include, without limitation, cells from Lactobacillus spp., Lactococcus spp., Bacillus spp., Enterobacter spp., Yersinia spp., Escherichia spp., Klebsiella spp., Acinetobacter spp., Bordetella spp., Neisseria spp., Aeromonas spp., Franciesella spp., Corynebacterium spp., Citrobacter spp., Chlamydia spp., Hemophilus spp., Brucella spp., Mycobacterium spp., Legionella spp., Rhodococcus spp., Pseudomonas spp., Helicobacter spp., Salmonella spp., Vibrio spp., Erysipelothrix spp., Salmonella spp., Staphylococcus spp., Streptomyces spp., Bacteroides spp., Prevotella spp., Clostridium spp., or Bifidobacterium spp. In some embodiments, the bacteria are non-pathogenic bacteria that are derived from a normal internal ecosystem such as bacterial flora. In some embodiments, the engineered microorganisms are non-pathogenic bacteria that are derived from a normal internal ecosystem of the gastrointestinal tract. Non-limiting examples of non-pathogenic bacteria that are part of the normal flora in the gastrointestinal tract include bacteria from the genera Bacteroides, Clostridium, Fusobacterium, Eubacterium, Ruminococcus, Peptococcus, Peptostreptococcus, Bifidobacterium, Escherichia and Lactobacillus. In some embodiments, bacterial cells of the disclosure are anaerobic bacterial cells (e.g., cells that do not require oxygen for growth). Anaerobic bacterial cells include facultative anaerobic cells such as, for example, Escherichia coli, Shewanella oneidensis and Listeria monocytogenes. Anaerobic bacterial cells also include obligate anaerobic cells such as, for example, Bacteroides and Clostridium species. In humans, for example, anaerobic bacterial cells are most commonly found in the gastrointestinal tract. In certain embodiments, said bacterial cells comprising one or more writing plasmids and/or recording plasmids described herein, i.e., expressing CAMERA, are used to monitor and/or affect bacterial flora of the gastrointestinal tract. Without wishing to be bound to any particular strategy, in some embodiments, engineered strains of bacteria expressing CAMERA are introduced into the gastrointestinal tract of a subject so as to allow permanent recording of transient exposure to chemical inputs and/or therapeutics. In some embodiments, the engineered strains of bacteria are triggered (e.g., by a disease indicator or a change in the environment of the gastrointestinal tract).

### Methods

[0288] Some aspects of the present disclosure provide methods for stably and reproducibly recording the presence of one or more endogenous or exogenous stimuli in a cell. The cell data recorder systems described herein, as well as variations on the exemplary cell data recorder systems provided herein, can store information using a designed analog memory system that leaves permanent marks in DNA (e.g., DNA double strand breaks, DNA single strand breaks, recombinations, methylation, nucleobase editing) in a manner that reflects the strength and/or duration of the endogenous or exogenous stimulus (e.g., a small molecule, a protein, a peptide, an amino acid, a metabolite, an inorganic molecule, an organometallic molecule, an organic molecule, a drug or drug candidate, a sugar, a lipid, a metal, a nucleic acid, a molecule produced during the activation of an endogenous or an exogenous signaling cascade, light, heat, sound, pressure, mechanical stress, shear stress, or a virus or other microorganism, change in pH, or change in oxidation/reduction state). In addition, these multiplexable cell data recorder systems can be designed to record a specific set of stimuli (i.e., multiple stimuli), both independently and in an order dependent manner. These cell data recorder systems can be “reset” by erasing the cell data recorder system after recording of a stimulus or set of stimuli to restore the fidelity of the original cell data recorder system. Importantly, the cell data recorder systems function reproducibly after multiple rounds of recording and erasing, suggesting that these cell data recorder systems are durable, rewritable systems that can be employed in multiple round of recording and erasing without introducing unwanted off-target DNA damage (e.g., a high frequency of random insertions and deletions (indels)).

[0289] Thus, in some aspects, provided herein are methods for engineering a cell comprising contacting the cell with any of the cell data recorder systems provided herein. In some embodiments, the cell is a eukaryotic cell. In some embodiments, the eukaryotic cell is a mammalian cell. In some embodiments, the mammalian cell is a human cell (e.g., HEK293T), such as any of the cell lines provided herein. In some embodiments, the cell is a prokaryotic cell. In some embodiments, the prokaryotic cell is a bacterial cell. In some embodiments, the bacterial cell is an E. coli cell (e.g., S1030 cell or S2063 cell).

[0290] In some embodiments, the components of the cell data recorder system (e.g., vectors) are transfected into the cell. In some embodiments, the writing plasmid is transfected into the cell. In some embodiments, the writing plasmid does not comprise a nucleic acid sequence encoding a sgRNA. In some embodiments, from about 10 ng to about 500 ng of a plasmid (e.g., an accessory plasmid) comprising a nucleic acid sequence encoding one or more sgRNAs operably linked to one or more promoters is used in a transfection reaction for transfecting the cell. In some embodiments, from about 10 ng to about 60 ng of a plasmid (e.g., an accessory plasmid) comprising a nucleic acid sequence encoding one or more sgRNAs operably linked to one or more promoters is used in a transfection reaction for transfecting the cell. In some embodiments, about from 1 ng to 500 ng, e.g., about 40 ng, of a plasmid (e.g., an accessory plasmid) comprising a nucleic acid sequence encoding one or more sgRNAs operably linked to one or more promoters is used in a transfection reaction for transfecting the cell. In some embodiments, about 20 ng of a plasmid (e.g., an accessory plasmid) comprising a nucleic acid sequence encoding one or more sgRNAs operably linked to one or more promoters is used in a transfection reaction for transfecting the cell. In some embodiments, the cell expresses one or more sgRNAs, wherein each sgRNA is complementary to a target sequence. In some embodiments, the writing plasmid comprises one or more nucleic acid sequences encoding a sgRNA operably linked to a promoter, wherein the sgRNA is complementary to a sequence of interest. In some embodiments, one or more recording plasmids comprising a target sequence are transfected into the cell. In some embodiments, any of the cell data recorder systems provided herein are transfected into the cell.

[0291] In some embodiments, one or more components of the cell data recorder system (e.g., writing plasmid, one or more recording plasmids, additional accessory plasmids) are transfected into the cell via electroporation. In some embodiments, one or more components of the cell data recorder system (e.g., writing plasmid, one or more recording plasmids, additional accessory plasmids) are transfected into the cell via heat shock. In some embodiments, one or more components of the cell data recorder system (e.g., writing plasmid, one or more recording plasmids, additional accessory plasmids) are transfected into the cell via a composition comprising a cationic lipid reagent. In some embodiments, the cationic lipid is Lipofectamine® 2000. In some embodiments, the cationic lipid reagent is selected from those discussed in Patent Publication No. WO2015/035136, published Mar. 12, 2015, entitled “Delivery Systems for Functional Nucleases”; which is hereby encorporated by reference in its entirety. In some embodiments, from about 10 ng to about 1000 ng of a writing plasmid is used in a transfection reaction for transfecting the cell. In some embodiments, from about 500 ng to about 1000 ng of a writing plasmid is used in a transfection reaction for transfecting the cell. In some embodiments, from about 700 ng to about 900 ng of a writing plasmid is used in a transfection reaction for transfecting the cell. In some embodiments, about 800 ng of a writing plasmid is used in a transfection reaction for transfecting the cell. In some embodiments, from about 50 ng to about 150 ng of a writing plasmid is used in a transfection reaction for transfecting the cell. In some embodiments, about 100 ng of a writing plasmid is used in a transfection reaction for transfecting the cell. In some embodiments, from about 100 ng to about 1000 ng of a recording plasmid is used in a transfection reaction for transfecting the cell. In some embodiments, from about 400 ng to about 600 ng of a recording plasmid is used in a transfection reaction for transfecting the cell. In some embodiments, about 500 ng of a recording plasmid is used in a transfection reaction for transfecting the cell. In some embodiments, a 20:1 ratio of recording plasmid:writing plasmid is used in a transfection reaction for transfecting the cell. In some embodiments, a 10:1 ratio of recording plasmid:writing plasmid is used in a transfection reaction for transfecting the cell. In some embodiments, a 5:1 ratio of recording plasmid:writing plasmid is used in a transfection reaction for transfecting the cell. In some embodiments, a 2:1 ratio of recording plasmid:writing plasmid is used in a transfection reaction for transfecting the cell. In some embodiments, a 20:20:1 ratio of first recording plasmid:second recording plasmid:writing plasmid is used in a transfection reaction for transfecting the cell. In some embodiments, a 10:10:1 ratio of first recording plasmid:second recording plasmid:writing plasmid is used in a transfection reaction for transfecting the cell. In some embodiments, a 5:5:1 ratio of first recording plasmid:second recording plasmid:writing plasmid is used in a transfection reaction for transfecting the cell. In some embodiments, a 2:2:1 ratio of first recording plasmid:second recording plasmid:writing plasmid is used in a transfection reaction for transfecting the cell. In some embodiments, a 10:2:1 ratio of first recording plasmid:second recording plasmid:writing plasmid is used in a transfection reaction for transfecting the cell. In some embodiments, a 1:1 ratio of first recording plasmid:second recording plasmid is used in a transfection reaction for transfecting the cell. In some embodiments, a 2:1 ratio of first recording plasmid:second recording plasmid is used in a transfection reaction for transfecting the cell. In some embodiments, a 5:1 ratio of first recording plasmid:second recording plasmid is used in a transfection reaction for transfecting the cell. In some embodiments, a 10:1 ratio of first recording plasmid:second recording plasmid is used in a transfection reaction for transfecting the cell.

[0292] In another aspect, provided herein are methods for recording the presence and/or duration of a stimulus in an engineered cell, the method comprising: (i) providing an engineered cell comprising a cell data recorder system provided herein; and (ii) determining an amount of the first recording plasmid (R1) and an amount of the second recording plasmid (R2) in the engineered cell. In some embodiments, the engineered cell is produced by a method provided herein. In some embodiments, R1 comprises a first target sequence. In some embodiments, R2 comprises a second target sequence. In some embodiments, the first target sequence and the second target sequence are not the same. In some embodiments, the cell is a prokaryotic cell. In some embodiments, the prokaryotic cell is a bacterial cell. In some embodiments, the bacterial cell is an E. coli cell (e.g., S1030 cell or S2063 cell).

[0293] In some embodiments, the napDNAbp of the cell data recorder system is associated with a sgRNA complementary to the target sequence of R1, and the sgRNA is not complementary to the target sequence of R2. In some embodiments, the sgRNA is encoded by the writing plasmid, and the nucleic acid sequence encoding the sgRNA is operably linked to a promoter. In some embodiments, the sgRNA is expressed by the cell. In some embodiments, the sgRNA is not encoded by the writing plasmid. In some embodiments, the sgRNA is encoded by an additional plasmid (e.g., an accessory plasmid), and the nucleic acid sequence encoding the sgRNA is operably linked to a promoter. In some embodiments, the napDNAbp is a nuclease active Cas9 domain. In some embodiments, the target sequence of R1 is present in a reporter gene encoding a functional reporter protein. In some embodiments, the functional reporter protein is a fluorescent protein. In some embodiments, the fluorescent protein is EGFP. In some embodiments, the target sequence of R2 is present in a reporter gene encoding a non-functional reporter protein. In some embodiments, the non-functional reporter protein does not produce fluorescence.

[0294] In some embodiments, the amount of the first recording plasmid (R1), and/or the amount of the second recording plasmid (R2) is determined using high-throughput sequencing of the amplified target sequence of R1 and/or R2. In some embodiments, the amount of the first recording plasmid (R1) is determined using high-throughput sequencing of the amplified target sequence of R1. In some embodiments, the amount of the second recording plasmid (R2) is determined using high-throughput sequencing of the amplified target sequence of R2. In some embodiments, the amount of the first recording plasmid (R1), and/or the second recording plasmid (R2) is determined by measuring a level of fluorescence from the cell. In some embodiments, the level of fluorescence from the cell corresponds to the amount of functional reporter protein expressed in the cell. In some embodiments, the amount of R1 and/or R2 is determined when the cell is not contacted with a stimulus. In some embodiments, the amount of R1 and/or R2 is determined when the cell is contacted with one or more stimuli. In some embodiments, the amount of R1 and/or R2 is determined when the cell is contacted with a stimulus. In some embodiments, the stimulus is a small molecule, a protein, a peptide, an amino acid, a metabolite, an inorganic molecule, an organometallic molecule, an organic molecule, a drug or drug candidate, a sugar, a lipid, a metal, a nucleic acid, a molecule produced during the activation of an endogenous or an exogenous signaling cascade, light, heat, sound, pressure, mechanical stress, shear stress, or a virus or other microorganism, change in pH, or change in oxidation/reduction state. In some embodiments, the stimulus is a small molecule. In some embodiments, the stimulus is an antibiotic. In some embodiments, the stimulus is a sugar. In some embodiments, the stimulus is anhydrotetracycline, IPTG, rhamnose, arabinose, tanespimycin, tunicamycin, or doxycycline. In some embodiments, the amount of R1 and/or R2 is determined when the cell is contacted with two stimuli. In some embodiments, the cell is contacted with the two stimuli simultaneously. In some embodiments, the cell is contacted with the two stimuli sequentially. In some embodiments, the first stimulus induces expression of the napDNAbp encoded by the writing plasmid and the second stimulus induces expression of an sgRNA encoded by the writing plasmid and/or encoded by an additional plasmid (e.g., an accessory plasmid), and wherein both stimuli are required for sgRNA association with the napDNAbp. In some embodiments, the napDNAbp introduces a DNA double-strand break in the target sequence of the recording plasmid complementary to the sgRNA, thereby reducing the amount of the recording plasmid. In some embodiments, the napDNAbp introduces a DNA double-strand break in the target sequence of the recording plasmid complementary to the sgRNA, thereby reducing the amount of functional reporter protein expressed in the cell. In some embodiments, the two stimuli are independently a small molecule, a protein, a peptide, an amino acid, a metabolite, an inorganic molecule, an organometallic molecule, an organic molecule, a drug or drug candidate, a sugar, a lipid, a metal, a nucleic acid, a molecule produced during the activation of an endogenous or an exogenous signaling cascade, light, heat, sound, pressure, mechanical stress, shear stress, or a virus or other microorganism, change in pH, or change in oxidation/reduction state. In some embodiments, the two stimuli are independently a small molecule. In some embodiments, the two stimuli are independently an antibiotic. In some embodiments, the two stimuli are independently a sugar. In some embodiments, the two stimuli are independently anhydrotetracycline, IPTG, rhamnose, arabinose, tanespimycin, tunicamycin, or doxycycline. In some embodiments, the cell is contacted with the one or more stimuli at least once. In some embodiments, the cell is contacted with the one or more stimuli at least two, at least three, at least four, at least five, at least six, at least seven, at least eight, at least nine, or at least ten times. In some embodiments, the cell is contacted with the one or more stimuli more than ten times. In some embodiments, in the presence of one or more stimuli, the napDNAbp introduces a DNA double-strand break in the target sequence of R1, thereby reducing the amount of R1. In some embodiments, in the presence of one or more stimuli, the napDNAbp introduces a DNA double-strand break in the target sequence of R1, thereby reducing the amount of functional reporter protein expressed in the cell. In some embodiments, the cell is contacted with the one or more stimuli for at least one, at least two, at least three, at least four, at least five, at least six, at least seven, at least eight, at least nine, at least ten, or more hours. In some embodiments, the step of determining the amount of the first recording plasmid (R1) and/or the amount of the second recording plasmid (R2) is performed one, two, three, four, five, six, seven, eight, nine, ten, or more times. In some embodiments, the step of determining the amount of the first recording plasmid (R1) and/or the amount of the second recording plasmid (R2) is performed before the cell is contacted with the one or more stimuli, and the step of determining the amount of the first recording plasmid (R1) and/or the amount of the second recording plasmid (R2) is performed at least once after the cell is contacted with the one or more stimuli.

[0295] In some embodiments, the method further comprises determining a ratio of the amount of the first recording plasmid (R1) and the amount of the second recording plasmid (R2). In some embodiments, the ratio of R1 to R2 is determined when the cell is not contacted with the one or more stimuli. In some embodiments, the ratio is determined when the cell is contacted with the one or more stimuli. In some embodiments, the cell is contacted with the one or more stimuli at least once. In some embodiments, the cell is contacted with the one or more stimuli two, three, four, five, six, seven, eight, nine, or ten times. In some embodiments, the cell is contacted with the one or more stimuli more than ten times. In some embodiments, the step of determining the ratio is performed one time after the cell has been contacted with the one or more stimuli. In some embodiments, the step of determining the ratio is performed two, three, four, five, six, seven, eight, nine, or ten times after the cell has been contacted with the one or more stimuli. In some embodiments, the cell is contacted with the one or more stimuli for at least one, at least two, at least three, at least four, at least five, at least six, at least seven, at least eight, at least nine, at least ten, or more hours. In some embodiments, the step of determining the ratio is performed before the cell is contacted with the one or more stimuli, and the step of determining the ratio is performed at least once after the cell is contacted with the one or more stimuli.

[0296] In some embodiments, the method further comprises comparing the ratio of R1 to R2 in the presence of the stimulus to the ratio of R1 to R2 in the absence of the one or more stimuli. In some embodiments, the ratio of R1 to R2 does not significantly change in the absence of the one or more stimuli. In some embodiments, a change in the ratio of R1 to R2 indicates the presence of the one or more stimuli. In some embodiments, the ratio of R1 to R2 decreases in the presence of the one or more stimuli. In some embodiments, the ratio of R1 to R2 decreases in the presence of one stimulus. In some embodiments, the ratio of R1 to R2 decreases by at least 1%, at least 5%, at least 10%, at least 15%, at least 20%, at least 25%, at least 30%, at least 35%, at least 40%, at least 45%, at least 50%, at least 55%, or at least 65% in the presence of the stimulus. In some embodiments, the ratio of R1 to R2 decreases by at least 2-fold, at least 3-fold, at least 4-fold, at least 5-fold, or more in the presence of the stimulus. In some embodiments, the ratio of R1 to R2 decreases only in the presence of two stimuli. In some embodiments, the ratio of R1 to R2 decreases by at least 1%, at least 5%, at least 10%, at least 15%, at least 20%, at least 25%, at least 30%, at least 35%, at least 40%, at least 45%, at least 50%, at least 55%, or at least 65% in the presence of the two stimuli. In some embodiments, the ratio of R1 to R2 decreases by at least 2-fold, at least 3-fold, at least 4-fold, at least 5-fold, or more in the presence of the two stimuli. In some embodiments, the ratio of R1 to R2 decreases only in the presence of more than two stimuli. In some embodiments, the ratio of R1 to R2 decreases by at least 1%, at least 5%, at least 10%, at least 15%, at least 20%, at least 25%, at least 30%, at least 35%, at least 40%, at least 45%, at least 50%, at least 55%, or at least 65% in the presence of more than two stimuli. In some embodiments, the ratio of R1 to R2 decreases by at least 2-fold, at least 3-fold, at least 4-fold, at least 5-fold, or more in the presence of more than two stimuli. In some embodiments, the step of comparing is performed when the cell is not contacted with the one or more stimuli. In some embodiments, the step of comparing is performed when the cell is contacted with the one or more stimuli. In some embodiments, the cell is contacted with the one or more stimuli at least once. In some embodiments, the cell is contacted with the one or more stimuli two, three, four, five, six, seven, eight, nine, or ten times. In some embodiments, the cell is contacted with the one or more stimuli more than ten times. In some embodiments, the step of comparing is performed one time after the cell has been contacted with the one or more stimuli. In some embodiments, the step of comparing is performed two, three, four, five, six, seven, eight, nine, or ten times after the cell has been contacted with the one or more stimuli. In some embodiments, the cell is contacted with the one or more stimuli for at least one, at least two, at least three, at least four, at least five, at least six, at least seven, at least eight, at least nine, at least ten, or more hours. In some embodiments, the step of comparing is performed before the cell is contacted with the one or more stimuli, and the step of comparing is performed at least once after the cell is contacted with the one or more stimuli.

[0297] In some embodiments, the method for recording the presence/and or duration of one or more stimuli in a cell comprises: (i) providing an engineered cell comprising the cell data recorder system; (ii) determining an amount of the first recording plasmid (R1) and an amount of the second recording plasmid (R2) in the engineered cell; (iii) determining a ratio of the amount of the first recording plasmid (R1) and the amount of the second recording plasmid (R2); and (iv) comparing the ratio of R1 to R2 in the presence of the stimulus to the ratio of R1 to R2 in the absence of the stimulus.

[0298] In some embodiments, the method further comprises resetting the amount of the first recording plasmid (R1) and the amount of the second recording plasmid (R2) in the cell. In some embodiments, R1 comprises (i) a nucleic acid sequence encoding a variant of an antibiotic resistance protein comprising one or more mutations, wherein the one or more mutations result in an antibiotic resistance protein that does not confer antibiotic resistance, and (ii) a nucleic acid sequence encoding an antibiotic resistance protein, wherein the antibiotic resistance protein confers antibiotic resistance. In some embodiments, R2 comprises (i) a nucleic acid sequence encoding a variant of an antibiotic resistance protein comprising one or more mutations, wherein the one or more mutations result in an antibiotic resistance protein that does not confer antibiotic resistance, and (ii) a nucleic acid sequence encoding an antibiotic resistance protein, wherein the antibiotic resistance protein confers antibiotic resistance. In some embodiments, the antibiotic resistance protein and variant of R1 are not identical to the antibiotic resistance protein and variant of R2. In some embodiments, R1 comprises (i) a nucleic acid sequence encoding a Cat variant comprising a H195A mutation in the amino acid sequence provided by SEQ ID NO: P1, wherein the H195A mutation results in a Cat protein that does not confer chloramphenicol resistance, and (ii) a nucleic acid sequence encoding aminoglycoside-3′-phosphotransferase (Aph3′), wherein the Aph3′ protein confers kanamycin resistance. In some embodiments, R2 comprises (i) a nucleic acid sequence encoding chloramphenicol acetyletransferase (Cat), and wherein the Cat protein confers chloramphenicol resistance, and (ii) a nucleic acid sequence encoding a Aph3′ protein comprising a D208A mutation in the amino acid sequence provided by SEQ ID NO: P2, and wherein the D208A mutation results in a Aph3′ protein that does not confer kanamycin resistance. In some embodiments, the resetting comprises contacting the cell with a first antibiotic. In some embodiments, the cell is contacted with between 1 μg/mL and 20 μg/mL of the first antibiotic. In some embodiments, the first antibiotic is chloramphenicol. In some embodiments, the first antibiotic is kanamycin. In some embodiments, the first antibiotic reduces the amount of R1. In some embodiments, the first antibiotic is chloramphenicol. In some embodiments, the first antibiotic is kanamycin. In some embodiments, the first antibiotic reduces the amount of R2. In some embodiments, the first antibiotic is chloramphenicol. In some embodiments, the first antibiotic is kanamycin. In some embodiments, the resetting comprises contacting the cell with a second antibiotic. In some embodiments, the cell is contacted with between 1 μg/mL and 20 μg/mL of the second antibiotic. In some embodiments, the second antibiotic reduces the amount of R1. In some embodiments, the second antibiotic is chloramphenicol. In some embodiments, the second antibiotic is kanamycin. In some embodiments, the second antibiotic reduces the amount of R2. In some embodiments, the second antibiotic is chloramphenicol. In some embodiments, the second antibiotic is kanamycin. In some embodiments, the second antibiotic is different than the first antibiotic. In some embodiments, the first antibiotic is chloramphenicol and the second antibiotic is kanamycin. In some embodiments, the first antibiotic is kanamycin and the second antibiotic is chloramphenicol. In some embodiments, the resetting is achieved by contacting the cell with the first antibiotic and/or the second antibiotic for at least 6 hours, 8 hours, 10 hours, 12 hours, 24 hours, or more. In some embodiments, the cell is contacted with the first antibiotic and/or the second antibiotic at least once. In some embodiments, the cell is contacted with the first antibiotic and/or the second antibiotic at least two, at least three, at least four, at least five, at least six, at least seven, at least eight, at least nine, or at least ten times. In some embodiments, the ratio of R1 to R2 after resetting is within 1%, 2%, 3%, 4%, 5%, 6%, 7%, 8%, 9%, or 10% of the ratio of R1 to R2 after the cell has been exposed to the one or more stimuli.

[0299] In another aspect, provided herein are methods for recording the presence and/or duration of a stimulus in an engineered cell, the method comprising: (i) providing an engineered cell comprising a cell data recorder system provided herein; and (ii) determining the percentage of base editing in a target sequence of a recording plasmid (R1). In some embodiments, the engineered cell is produced by a method provided herein. In some embodiments, the cell is a prokaryotic cell. In some embodiments, the prokaryotic cell is a bacterial cell. In some embodiments, the bacterial cell is an E. coli cell (e.g., S1030 cell or S2063 cell).

[0300] In some embodiments, the writing plasmid of the cell data recorder system comprises a nucleic acid sequence encoding a fusion protein comprising a napDNAbp and a nucleic acid editing domain. In some embodiments, the napDNAbp of the cell data recorder system is associated with a sgRNA complementary to the target sequence of R1. In some embodiments, the sgRNA is encoded by the writing plasmid, and the nucleic acid sequence encoding the sgRNA is operably linked to a promoter. In some embodiments, the sgRNA is expressed by the cell. In some embodiments, the sgRNA is not encoded by the writing plasmid. In some embodiments, the sgRNA is encoded by an additional plasmid (e.g., an accessory plasmid), and the nucleic acid sequence encoding the sgRNA is operably linked to a promoter. In some embodiments, the napDNAbp is a nuclease inactive Cas9 domain. In some embodiments, the napDNAbp is a dCas9 domain. In some embodiments, the napDNAbp is a Cas9n domain. In some embodiments, the nucleic acid editing domain is a deaminase domain. In some embodiments, the deaminase domain is a cytidine deaminase domain. In some embodiments, the fusion protein comprises a dCas9 domain and a cytidine deaminase domain. In some embodiments, the fusion protein is a base editor. In some embodiments, the fusion protein edits a single base in the target sequence complementary to the sgRNA, thereby editing the recording plasmid. In some embodiments, the fusion protein introduces a single C·G to T·A mutation in the strand of the target sequence not bound by the sgRNA associated with the napDNAbp. In some embodiments, the fusion protein edits a single base in a first target sequence, thereby generating a second target sequence complementary to a different sgRNA. In some embodiments, the target sequence of R1 is present in a reporter gene encoding a functional reporter protein. In some embodiments, the functional reporter protein is a fluorescent protein. In some embodiments, the fluorescent protein is EGFP. In some embodiments, the target sequence of R1 is present in a reporter gene encoding a non-functional reporter protein. In some embodiments, the non-functional reporter protein does not produce fluorescence. In some embodiments, the target sequence of R1 is present in a reporter gene encoding a reporter protein comprising one or more insertions, deletions, and/or mutations.

[0301] In some embodiments, the percentage of base editing in a target sequence present in the recording plasmid (R1) is determined using high-throughput sequencing of the amplified target sequence. In some embodiments, the percentage of base editing is determined when the cell is not contacted with a stimulus. In some embodiments, the percentage of base editing is determined when the cell is contacted with one or more stimuli. In some embodiments, the percentage of base editing is determined when the cell is contacted with a stimulus. In some embodiments, the stimulus is a small molecule, a protein, a peptide, an amino acid, a metabolite, an inorganic molecule, an organometallic molecule, an organic molecule, a drug or drug candidate, a sugar, a lipid, a metal, a nucleic acid, a molecule produced during the activation of an endogenous or an exogenous signaling cascade, light, heat, sound, pressure, mechanical stress, shear stress, or a virus or other microorganism, change in pH, or change in oxidation/reduction state. In some embodiments, the stimulus is a small molecule. In some embodiments, the stimulus is an antibiotic. In some embodiments, the stimulus is a sugar. In some embodiments, the stimulus is anhydrotetracycline, IPTG, rhamnose, arabinose, tanespimycin, tunicamycin, or doxycycline. In some embodiments, the percentage of base editing is determined when the cell is contacted with two stimuli. In some embodiments, the cell is contacted with the two stimuli simultaneously. In some embodiments, the cell is contacted with the two stimuli sequentially. In some embodiments, the first stimulus induces expression of the fusion protein encoded by the writing plasmid and the second stimulus induces expression of an sgRNA encoded by the writing plasmid and/or encoded by an additional plasmid (e.g., an accessory plasmid), and wherein both stimuli are required for sgRNA association with the napDNAbp of the fusion protein. In some embodiments, the fusion protein edits a single base in the target sequence complementary to the sgRNA, thereby editing the recording plasmid. In some embodiments, the fusion protein introduces a single C·G to T·A mutation in the strand of the target sequence not bound by the sgRNA associated with the napDNAbp. In some embodiments, the two stimuli are independently a small molecule, a protein, a peptide, an amino acid, a metabolite, an inorganic molecule, an organometallic molecule, an organic molecule, a drug or drug candidate, a sugar, a lipid, a metal, a nucleic acid, a molecule produced during the activation of an endogenous or an exogenous signaling cascade, light, heat, sound, pressure, mechanical stress, shear stress, or a virus or other microorganism, change in pH, or change in oxidation/reduction state. In some embodiments, the two stimuli are independently a small molecule. In some embodiments, the two stimuli are independently an antibiotic. In some embodiments, the two stimuli are independently a sugar. In some embodiments, the two stimuli are independently anhydrotetracycline, IPTG, rhamnose, arabinose, tanespimycin, tunicamycin, or doxycycline. In some embodiments, the cell is contacted with the one or more stimuli at least once. In some embodiments, the cell is contacted with the one or more stimuli at least two, at least three, at least four, at least five, at least six, at least seven, at least eight, at least nine, or at least ten times. In some embodiments, the cell is contacted with the one or more stimuli more than ten times. In some embodiments, in the presence of one or more stimuli, the fusion protein edits a base in the target sequence, thereby increasing the percentage of base editing in the target sequence. In some embodiments, the cell is contacted with the one or more stimuli for at least one, at least two, at least three, at least four, at least five, at least six, at least seven, at least eight, at least nine, at least ten, or more hours. In some embodiments, the step of determining the percentage of base editing is performed one, two, three, four, five, six, seven, eight, nine, ten, or more times. In some embodiments, the step of determining the percentage of base editing is performed before the cell is contacted with the one or more stimuli, and the step of determining percentage of base editing is performed at least once after the cell is contacted with the one or more stimuli.

[0302] In some embodiments, the method further comprises comparing the percentage of base editing in the target sequence in the presence of the stimulus to the percentage of base editing in the target sequence in the absence of the one or more stimuli. In some embodiments, the the percentage of base editing in the target sequence does not significantly change in the absence of the one or more stimuli. In some embodiments, a change in the percentage of base editing in the target sequence indicates the presence of the one or more stimuli. In some embodiments, the the percentage of base editing in the target sequence increases in the presence of the one or more stimuli. In some embodiments, the percentage of base editing in the target sequence increases in the presence of one stimulus. In some embodiments, the percentage of base editing in the target sequence increases by at least 1%, at least 5%, at least 10%, at least 15%, at least 20%, at least 25%, at least 30%, at least 35%, at least 40%, at least 45%, at least 50%, at least 55%, at least 60%, at least 65%, at least 70%, at least 80%, at least 85%, or more in the presence of the stimulus. In some embodiments, the percentage of base editing in the target sequence increases by at least 2-fold, at least 3-fold, at least 4-fold, at least 5-fold, or more in the presence of the stimulus. In some embodiments, the percentage of base editing in the target sequence increases only in the presence of two stimuli. In some embodiments, the percentage of base editing in the target sequence increases by at least 1%, at least 5%, at least 10%, at least 15%, at least 20%, at least 25%, at least 30%, at least 35%, at least 40%, at least 45%, at least 50%, at least 55%, at least 60%, at least 65%, at least 70%, at least 80%, at least 85%, or more in the presence of the two stimuli. In some embodiments, the percentage of base editing in the target sequence increases by at least 2-fold, at least 3-fold, at least 4-fold, at least 5-fold, or more in the presence of the two stimuli. In some embodiments, the percentage of base editing in the target sequence increases only in the presence of more than two stimuli. In some embodiments, the percentage of base editing in the target sequence increases by at least 1%, at least 5%, at least 10%, at least 15%, at least 20%, at least 25%, at least 30%, at least 35%, at least 40%, at least 45%, at least 50%, at least 55%, at least 60%, at least 65%, at least 70%, at least 80%, at least 85%, or more in the presence of more than two stimuli. In some embodiments, the percentage of base editing in the target sequence increases by at least 2-fold, at least 3-fold, at least 4-fold, at least 5-fold, or more in the presence of more than two stimuli. In some embodiments, the step of comparing is performed when the cell is not contacted with the one or more stimuli. In some embodiments, the step of comparing is performed when the cell is contacted with the one or more stimuli. In some embodiments, the cell is contacted with the one or more stimuli at least once. In some embodiments, the cell is contacted with the one or more stimuli two, three, four, five, six, seven, eight, nine, or ten times. In some embodiments, the cell is contacted with the one or more stimuli more than ten times. In some embodiments, the step of comparing is performed one time after the cell has been contacted with the one or more stimuli. In some embodiments, the step of comparing is performed two, three, four, five, six, seven, eight, nine, or ten times after the cell has been contacted with the one or more stimuli. In some embodiments, the cell is contacted with the one or more stimuli for at least one, at least two, at least three, at least four, at least five, at least six, at least seven, at least eight, at least nine, at least ten, or more hours. In some embodiments, the step of comparing is performed before the cell is contacted with the one or more stimuli, and the step of comparing is performed at least once after the cell is contacted with the one or more stimuli.

[0303] In some embodiments, the method for recording the presence/and or duration of one or more stimuli in a cell comprises: (i) providing an engineered cell comprising the cell data recorder system; (ii) determining the percentage of base editing in a target sequence of a recording plasmid (R1); and (iii) comparing the percentage of base editing in the target sequence in the presence of the stimulus to the percentage of base editing in the absence of the stimulus.

[0304] In another aspect, provided herein are methods for recording the presence and/or duration of a stimulus in an engineered cell, the method comprising: (i) providing an engineered cell comprising a cell data recorder system provided herein; and (ii) determining the percentage of base editing in a target sequence of one or more recording loci. In some embodiments, the engineered cell is produced by a method provided herein. In some embodiments, the cell is a eukaryotic cell. In some embodiments, the eukaryotic cell is a mammalian cell. In some embodiments, the mammalian cell is a human cell (e.g., HEK293T cell).

[0305] In some embodiments, the writing plasmid of the cell data recorder system comprises a nucleic acid sequence encoding a fusion protein comprising a napDNAbp and a nucleic acid editing domain. In some embodiments, the napDNAbp of the cell data recorder system is associated with a sgRNA complementary to the target sequence of the recording locus. In some embodiments, the sgRNA is encoded by the writing plasmid, and the nucleic acid sequence encoding the sgRNA is operably linked to a promoter. In some embodiments, the sgRNA is expressed by the cell. In some embodiments, the sgRNA is not encoded by the writing plasmid. In some embodiments, the sgRNA is encoded by an additional plasmid (e.g., an accessory plasmid), and the nucleic acid sequence encoding the sgRNA is operably linked to a promoter. In some embodiments, the napDNAbp is a nuclease inactive Cas9 domain. In some embodiments, the napDNAbp is a dCas9 domain. In some embodiments, the napDNAbp is a Cas9n domain. In some embodiments, the nucleic acid editing domain is a deaminase domain. In some embodiments, the deaminase domain is a cytidine deaminase domain. In some embodiments, the fusion protein comprises a dCas9 domain and a cytidine deaminase domain. In some embodiments, the fusion protein is a base editor. In some embodiments, the fusion protein edits a single base in the target sequence complementary to the sgRNA, thereby editing the recording plasmid. In some embodiments, the fusion protein introduces a single C·G to T·A mutation in the strand of the target sequence not bound by the sgRNA associated with the napDNAbp. In some embodiments, the fusion protein edits a single base in a first target sequence, thereby generating a second target sequence complementary to a different sgRNA. In some embodiments, the one or more of the recording loci are located in a safe harbor locus. In some embodiments, the safe harbor locus is located in the CCR5 gene. In some embodiments, the CCR5 gene is a human CCR5 gene.

[0306] In some embodiments, the percentage of base editing in the recording locus is determined using high-throughput sequencing of the amplified target sequence. In some embodiments, the percentage of base editing is determined when the cell is not contacted with a stimulus. In some embodiments, the percentage of base editing is determined when the cell is contacted with one or more stimuli. In some embodiments, the percentage of base editing is determined when the cell is contacted with a stimulus. In some embodiments, the stimulus is a small molecule, a protein, a peptide, an amino acid, a metabolite, an inorganic molecule, an organometallic molecule, an organic molecule, a drug or drug candidate, a sugar, a lipid, a metal, a nucleic acid, a molecule produced during the activation of an endogenous or an exogenous signaling cascade, light, heat, sound, pressure, mechanical stress, shear stress, or a virus or other microorganism, change in pH, or change in oxidation/reduction state. In some embodiments, the stimulus is a small molecule. In some embodiments, the stimulus is an antibiotic. In some embodiments, the stimulus is a sugar. anhydrotetracycline, IPTG, rhamnose, arabinose, tanespimycin, tunicamycin, or doxycycline. In some embodiments, the percentage of base editing is determined when the cell is contacted with two stimuli. In some embodiments, the cell is contacted with the two stimuli simultaneously. In some embodiments, the cell is contacted with the two stimuli sequentially. In some embodiments, the first stimulus induces expression of the fusion protein encoded by the writing plasmid and the second stimulus induces expression of an sgRNA encoded by the writing plasmid and/or encoded by an additional plasmid (e.g., an accessory plasmid), and wherein both stimuli are required for sgRNA association with the napDNAbp of the fusion protein. In some embodiments, the fusion protein edits a single base in the target sequence complementary to the sgRNA, thereby editing the recording plasmid. In some embodiments, the fusion protein introduces a single C·G to T·A mutation in the strand of the target sequence not bound by the sgRNA associated with the napDNAbp. In some embodiments, the two stimuli are independently a small molecule, a protein, a peptide, an amino acid, a metabolite, an inorganic molecule, an organometallic molecule, an organic molecule, a drug or drug candidate, a sugar, a lipid, a metal, a nucleic acid, a molecule produced during the activation of an endogenous or an exogenous signaling cascade, light, heat, sound, pressure, mechanical stress, shear stress, or a virus or other microorganism, change in pH, or change in oxidation/reduction state. In some embodiments, the two stimuli are independently a small molecule. In some embodiments, the two stimuli are independently an antibiotic. In some embodiments, the two stimuli are independently a sugar. In some embodiments, the two stimuli are independently anhydrotetracycline, IPTG, rhamnose, arabinose, tanespimycin, tunicamycin, or doxycycline. In some embodiments, the cell is contacted with the one or more stimuli at least once. In some embodiments, the cell is contacted with the one or more stimuli at least two, at least three, at least four, at least five, at least six, at least seven, at least eight, at least nine, or at least ten times. In some embodiments, the cell is contacted with the one or more stimuli more than ten times. In some embodiments, in the presence of one or more stimuli, the fusion protein edits a base in the target sequence, thereby increasing the percentage of base editing in the target sequence. In some embodiments, the cell is contacted with the one or more stimuli for at least one, at least two, at least three, at least four, at least five, at least six, at least seven, at least eight, at least nine, at least ten, or more hours. In some embodiments, the step of determining the percentage of base editing is performed one, two, three, four, five, six, seven, eight, nine, ten, or more times. In some embodiments, the step of determining the percentage of base editing is performed before the cell is contacted with the one or more stimuli, and the step of determining percentage of base editing is performed at least once after the cell is contacted with the one or more stimuli.

[0307] In some embodiments, the method further comprises comparing the percentage of base editing in the target sequence in the presence of the stimulus to the percentage of base editing in the target sequence in the absence of the one or more stimuli. In some embodiments, the percentage of base editing in the target sequence does not significantly change in the absence of the one or more stimuli. In some embodiments, a change in the percentage of base editing in the target sequence indicates the presence of the one or more stimuli. In some embodiments, the percentage of base editing in the target sequence increases in the presence of the one or more stimuli. In some embodiments, the percentage of base editing in the target sequence increases in the presence of one stimulus. In some embodiments, the percentage of base editing in the target sequence increases by at least 1%, at least 5%, at least 10%, at least 15%, at least 20%, at least 25%, at least 30%, at least 35%, at least 40%, at least 45%, at least 50%, at least 55%, at least 60%, at least 65%, at least 70%, at least 80%, at least 85%, or more in the presence of the stimulus. In some embodiments, the percentage of base editing in the target sequence increases by at least 2-fold, at least 3-fold, at least 4-fold, at least 5-fold, or more in the presence of the stimulus. In some embodiments, the percentage of base editing in the target sequence increases only in the presence of two stimuli. In some embodiments, the percentage of base editing in the target sequence increases by at least 1%, at least 5%, at least 10%, at least 15%, at least 20%, at least 25%, at least 30%, at least 35%, at least 40%, at least 45%, at least 50%, at least 55%, at least 60%, at least 65%, at least 70%, at least 80%, at least 85%, or more in the presence of the two stimuli. In some embodiments, the percentage of base editing in the target sequence increases by at least 2-fold, at least 3-fold, at least 4-fold, at least 5-fold, or more in the presence of the two stimuli. In some embodiments, the percentage of base editing in the target sequence increases only in the presence of more than two stimuli. In some embodiments, the percentage of base editing in the target sequence increases by at least 1%, at least 5%, at least 10%, at least 15%, at least 20%, at least 25%, at least 30%, at least 35%, at least 40%, at least 45%, at least 50%, at least 55%, at least 60%, at least 65%, at least 70%, at least 80%, at least 85%, or more in the presence of more than two stimuli. In some embodiments, the percentage of base editing in the target sequence increases by at least 2-fold, at least 3-fold, at least 4-fold, at least 5-fold, or more in the presence of more than two stimuli. In some embodiments, the step of comparing is performed when the cell is not contacted with the one or more stimuli. In some embodiments, the step of comparing is performed when the cell is contacted with the one or more stimuli. In some embodiments, the cell is contacted with the one or more stimuli at least once. In some embodiments, the cell is contacted with the one or more stimuli two, three, four, five, six, seven, eight, nine, or ten times. In some embodiments, the cell is contacted with the one or more stimuli more than ten times. In some embodiments, the step of comparing is performed one time after the cell has been contacted with the one or more stimuli. In some embodiments, the step of comparing is performed two, three, four, five, six, seven, eight, nine, or ten times after the cell has been contacted with the one or more stimuli. In some embodiments, the cell is contacted with the one or more stimuli for at least one, at least two, at least three, at least four, at least five, at least six, at least seven, at least eight, at least nine, at least ten, or more hours. In some embodiments, the step of comparing is performed before the cell is contacted with the one or more stimuli, and the step of comparing is performed at least once after the cell is contacted with the one or more stimuli.

[0308] In some embodiments, the method for recording the presence/and or duration of one or more stimuli in a cell comprises: (i) providing an engineered cell comprising the cell data recorder system; (ii) determining the percentage of base editing in a target sequence of a recording locus; and (iii) comparing the percentage of base editing in the target sequence in the presence of the stimulus to the percentage of base editing in the absence of the stimulus.

### Nucleic Acid Programmable DNA Binding Proteins

[0309] Some aspects of this disclosure provide nucleic acid programmable DNA binding proteins (napDNAbps) that target DNA in a specific and programmable manner. These napDNAbps can associate with a guide RNA (gRNA) or single guide RNA (sgRNA) that comprises a nucleic acid sequence (e.g., RNA) that is complementary to a target sequence of interest (e.g., a sequence comprising a target site). A napDNAbp that is guided to a target by a gRNA sequence may be referred to as an RNA-programmable nuclease. In some embodiments, the RNA-programmable nuclease is a Cas9 domain (e.g., a Cas9 nuclease). In some embodiments, the RNA-programmable nuclease is programmed (i.e., directed) to bind to a target DNA sequence (e.g., in a plasmid or a gene). In some embodiments, the Cas9 domain is a Cas9 nuclease. Upon hybridization with the target DNA sequence, the Cas9 nuclease introduces a double-strand break in the target DNA sequence. In some embodiments, the Cas9 domain is a catalytically inactive dCas9 domain. Upon hybridization with the target DNA sequence, the catalytically inactive dCas9 domain cannot introduce a double-strand break in the target DNA sequence. In some embodiments, the Cas9 domain is a catalytically inactive Cas9n domain. Upon hybridization with the target DNA sequence, the catalytically inactive Cas9n domain introduces a single-strand break (i.e., a nick) in the target DNA sequence.

[0310] Non-limiting, exemplary Cas9 domains are provided herein. The Cas9 domain may be a nuclease active Cas9 domain, a nuclease inactive Cas9 domain, or a Cas9 nickase domain. In some embodiments, the Cas9 domain is a nuclease active domain. For example, the Cas9 domain may be a Cas9 domain that cuts both strands of a duplexed nucleic acid (e.g., both strands of a duplexed DNA molecule). In some embodiments, the Cas9 domain comprises the amino acid sequence set forth in SEQ ID NO: 10. In some embodiments, the Cas9 domain comprises any one of the amino acid sequences as set forth in SEQ ID NOs: 11-260. In some embodiments the Cas9 domain comprises an amino acid sequence that is at least 60%, at least 65%, at least 70%, at least 75%, at least 80%, at least 85%, at least 90%, at least 95%, at least 96%, at least 97%, at least 98%, at least 99%, or at least 99.5% identical to any one of the amino acid sequences set forth in SEQ ID NOs: 10-260. In some embodiments, the Cas9 domain comprises an amino acid sequence that has 1, 2, 3, 4, 5, 6, 7, 8, 9, 10, 11, 12, 13, 14, 15, 16, 17, 18, 19, 20, 21, 22, 23, 24, 25, 26, 27, 28, 29, 30, 31, 32, 33, 34, 35, 36, 37, 38, 39, 40, 41, 42, 43, 44, 45, 46, 47, 48, 49, 50, or more or more mutations compared to any one of the amino acid sequences set forth in SEQ ID NOs: 10-260. In some embodiments, the Cas9 domain comprises an amino acid sequence that has at least 10, at least 15, at least 20, at least 30, at least 40, at least 50, at least 60, at least 70, at least 80, at least 90, at least 100, at least 150, at least 200, at least 250, at least 300, at least 350, at least 400, at least 500, at least 600, at least 700, at least 800, at least 900, at least 1000, at least 1100, or at least 1200 identical contiguous amino acid residues as compared to any one of the amino acid sequences set forth in SEQ ID NOs: 10-260. In some embodiments, the Cas9 domain of any of the fusion proteins provided herein comprises of the amino acid sequence of any one of SEQ ID NOs: 10-260. In some embodiments, the Cas9 domain of any of the fusion proteins provided herein consists of the amino acid sequence of any one of SEQ ID NOs: 10-260.

[0311] In some embodiments, the Cas9 domain is a nuclease-inactive Cas9 domain (dCas9). For example, the dCas9 domain may bind to a duplexed nucleic acid molecule (e.g., via a gRNA molecule) without cleaving either strand of the duplexed nucleic acid molecule. In some embodiments, the nuclease-inactive dCas9 domain comprises a D10X mutation and a H840X mutation of the amino acid sequence set forth in SEQ ID NO: 10, or a corresponding mutation in any of the amino acid sequences provided in SEQ ID NOs: 11-260, wherein X is any amino acid change. In some embodiments, the nuclease-inactive dCas9 domain comprises a D10A mutation and a H840A mutation of the amino acid sequence set forth in SEQ ID NO: 10, or a corresponding mutation in any of the amino acid sequences provided in SEQ ID NOs: 11-260. For example, a nuclease-inactive Cas9 domain (dCas9) comprises the amino acid sequence set forth in SEQ ID NO: 6. In some embodiments, the dCas9 domain of any of the fusion proteins provided herein comprises of the amino acid sequence of SEQ ID NOs: 6. In some embodiments, the dCas9 domain of any of the fusion proteins provided herein consists of the amino acid sequence of SEQ ID NO: 6. As another example, a nuclease-inactive Cas9 domain comprises the amino acid sequence set forth in SEQ ID NO: 9 (Cloning vector pPlatTET-gRNA2, Accession No. BAV54124).

MDKKYSIGLAIGTNSVGWAVITDEYKVPSKKEKVLGNTDRHSIKKNLIG
ALLEDSGETAEATRLKRTARRRYTRRKNRICYLQEIFSNEMAKVDDSFE
HRLEESELVEEDKKHERHPIEGNIVDEVAYHEKYPTIYHLRKKLVDSTD
KADLRLIYLALAHMIKERGHFLIEGDLNPDNSDVDKLFIQLVQTYNQLF
EENPINASGVDAKAILSARLSKSRRLENLIAQLPGEKKNGLEGNLIALS
LGLIPNEKSNEDLAEDAKLQLSKDTYDDDLDNLLAQIGDQYADLFLAAK
NLSDAILLSDILRVNTEITKAPLSASMIKRYDEHHQDLILLKALVRQQL
PEKYKEIFEDQSKNGYAGYIDGGASQEEFYKFIKPILEKMDGTEELLVK
LNREDLLRKQRTEDNGSIPHQIHLGELHAILRRQEDFYPFLKDNREKIE
KILTFRIPYYVGPLARGNSRFAWMTRKSEETITPWNFEEVVDKGASAQS
FIERMTNEDKNLPNEKVLPKHSLLYEYFTVYNELTKVKYVTEGMRKPAE
LSGEQKKAIVDLLEKTNRKVTVKQLKEDYFKKIECEDSVEISGVEDRFN
ASLGTYHDLLKIIKDKDFLDNEENEDILEDIVLTLTLFEDREMIEERLK
TYAHLFDDKVMKQLKRRRYTGWGRLSRKLINGIRDKQSGKTILDFLKSD
GFANRNFMQLIHDDSLTEKEDIQKAQVSGQGDSLHEHIANLAGSPAIKK
GILQTVKVVDELVKVMGRHKPENIVIEMARENQTTQKGQKNSRERMKRI
EEGIKELGSQILKEHPVENTQLQNEKLYLYYLQNGRDMYVDQELDINRL
SDYDVDAIVPQSFLKDDSIDNKVLIRSDKNRGKSDNVPSEEVVKKMKNY
WRQLLNAKLITQRKEDNLTKAERGGLSELDKAGFIKRQLVETRQIIKHV
AQILDSRMNIKYDENDKLIREVKVITLKSKLVSDFRKDFQFYKVREINN
YHHAHDAYLNAVVGTALIKKYPKLESEFVYGDYKVYDVRKMIAKSEQEI
GKATAKYFFYSNIMNFEKTEITLANGEIRKRPLIETNGETGEIVWDKGR
DFATVRKVLSMPQVNIVKKTEVQTGGESKESILPKRNSDKLIARKKDWD
PKKYGGEDSPTVAYSVLVVAKVEKGKSKKLKSVKELLGITIMERSSFEK
NPIDFLEAKGYKEVKKDLIIKLPKYSLFELENGRKRMLASAGELQKGNE
LALPSKYVNFLYLASHYEKLKGSPEDNEQKQLFVEQHKHYLDEIIEQIS
EFSKRVILADANLDKVLSAYNKHRDKPIREQAENIIHLFTLTNLGAPAA
FKYFDTTIDRKRYTSTKEVLDATLIHQSITGLYETRIDLSQLGGD
(SEQ ID NO: 9; see, e.g., Qi et al., Repurposing
CRISPR as an RNA-guided platform for sequence-
specific control of gene expression. Cell. 2013;
152(5):1173-83, the entire contents of which are
incorporated herein by reference).

[0312] Additional suitable nuclease-inactive dCas9 domains will be apparent to those of ordinary skill in the art based on this disclosure and knowledge in the field, and are within the scope of this disclosure. Such additional exemplary suitable nuclease-inactive Cas9 domains include, but are not limited to, D10A/H840A, D10A/D839A/H840A, and D10A/D839A/H840A/N863A mutant domains (see, e.g., Prashant et al., CAS9 transcriptional activators for target specificity screening and paired nickases for cooperative genome engineering. Nature Biotechnology. 2013; 31(9): 833-838, the entire contents of which are incorporated herein by reference). In some embodiments the dCas9 domain comprises an amino acid sequence that is at least 60%, at least 65%, at least 70%, at least 75%, at least 80%, at least 85%, at least 90%, at least 95%, at least 96%, at least 97%, at least 98%, at least 99%, or at least 99.5% identical to any one of the dCas9 domains provided herein. In some embodiments, the dCas9 domain comprises an amino acid sequences that has 1, 2, 3, 4, 5, 6, 7, 8, 9, 10, 11, 12, 13, 14, 15, 16, 17, 18, 19, 20, 21, 22, 21, 24, 25, 26, 27, 28, 29, 30, 31, 32, 33, 34, 35, 36, 37, 38, 39, 40, 41, 42, 43, 44, 45, 46, 47, 48, 49, 50, or more or more mutations compared to any one of the amino acid sequences set forth in SEQ ID NOs: 10-260. In some embodiments, the dCas9 domain comprises an amino acid sequence that has at least 10, at least 15, at least 20, at least 30, at least 40, at least 50, at least 60, at least 70, at least 80, at least 90, at least 100, at least 150, at least 200, at least 250, at least 300, at least 350, at least 400, at least 500, at least 600, at least 700, at least 800, at least 900, at least 1000, at least 1100, or at least 1200 identical contiguous amino acid residues as compared to any one of the amino acid sequences set forth in SEQ ID NOs: 10-260.

[0313] In some embodiments, the Cas9 domain is a Cas9 nickase (Cas9n). The Cas9 nickase may be a Cas9 protein that is capable of cleaving only one strand of a duplexed nucleic acid molecule (e.g., a duplexed DNA molecule). In some embodiments, the Cas9 nickase cleaves the target strand of a duplexed target nucleic acid molecule, meaning that the Cas9 nickase cleaves the strand that is base paired to (complementary to) a gRNA (e.g., an sgRNA) that is bound to the Cas9. In some embodiments, a Cas9 nickase comprises a D10A mutation and has a histidine at position 840 of SEQ ID NO: 10, or the corresponding mutation in any of SEQ ID NOs: 11-260. For example, a Cas9 nickase may comprise the amino acid sequence as set forth in SEQ ID NO: 7. In some embodiments the Cas9 nickase cleaves the non-target, non-base-edited strand of a duplexed nucleic acid molecule, meaning that the Cas9 nickase cleaves the strand that is not base paired to a gRNA (e.g., an sgRNA) that is bound to the Cas9. In some embodiments, a Cas9 nickase comprises an H840A mutation and has an aspartic acid residue at position 10 of SEQ ID NO: 10, or a corresponding mutation in any of SEQ ID NOs: 11-260. For example, a Cas9 nickase may comprise the amino acid sequence as set forth in SEQ ID NO: 8. In some embodiments, the Cas9n domain of any of the fusion proteins provided herein comprises of the amino acid sequence of SEQ ID NOs: 7. In some embodiments, the Cas9n domain of any of the fusion proteins provided herein consists of the amino acid sequence of SEQ ID NO: 7. In some embodiments, the Cas9n domain of any of the fusion proteins provided herein comprises of the amino acid sequence of SEQ ID NOs: 8. In some embodiments, the Cas9n domain of any of the fusion proteins provided herein consists of the amino acid sequence of SEQ ID NO: 8. In some embodiments the Cas9 nickase comprises an amino acid sequence that is at least 60%, at least 65%, at least 70%, at least 75%, at least 80%, at least 85%, at least 90%, at least 95%, at least 96%, at least 97%, at least 98%, at least 99%, or at least 99.5% identical to any one of the Cas9 nickases provided herein. Additional suitable Cas9 nickases will be apparent to those of ordinary skill in the art based on this disclosure and knowledge in the field, and are within the scope of this disclosure.

[0314] In some embodiments, a Cas9 nickase may further facilitate the removal of a base on the non-edited strand in an organism whose genome is edited in vivo. The Cas9 nickase, as described herein, may comprise a D10A mutation in SEQ ID NO: 10, or a corresponding mutation in any of SEQ ID NOs: 11-260. In some embodiments, the Cas9 nickase of this disclosure may comprise a histidine at mutation 840 of SEQ ID NO: 10, or a corresponding residue in any of SEQ ID NOs: 11-260. Such fusion proteins comprising the Cas9 nickase can cleave a single strand of the target DNA sequence, e.g., the strand that is not being edited. Without wishing to be bound by any particular theory, this cleavage may inhibit mis-match repair mechanisms that reverse a C to U edit made by the cytidine deaminase, ultimately resulting in a C to T change as directed by a cytidine deaminase. As another example, the presence of the catalytic residue (e.g., H840) maintains the activity of the Cas9 to cleave the non-edited (e.g., non-deaminated) strand containing a T opposite a targeted A nucleobase. Mutation of the catalytic residue (e.g., D10 to A10) of Cas9 prevents cleavage of the edited strand containing the targeted A residue. Such Cas9 variants are able to generate a single-strand DNA break (nick) at a specific location based on the gRNA-defined target sequence, leading to repair of the non-edited strand, ultimately resulting in a T to C change on the non-edited strand as directed by an adenosine deaminase.

[0315] Some aspects of the disclosure provide Cas9 domains that have different PAM specificities, such as, for example, Cas9 domains from Staphylococcus aureus. Typically, Cas9 proteins, such as Cas9 from S. pyogenes (spCas9), require a canonical 5′-NGG-3′ PAM sequence to bind a particular nucleic acid region. This may limit the ability to edit desired bases within a genome. In some embodiments, the base editing fusion proteins provided herein may need to be placed at a precise location, for example where a target base is placed within a 4 base region (e.g., a “deamination window”), which is approximately 15 bases upstream of the PAM. See Komor et al., “Programmable editing of a target base in genomic DNA without double-stranded DNA cleavage” Nature 533, 420-424 (2016), the entire contents of which is hereby incorporated by reference. Accordingly, in some embodiments, any of the fusion proteins provided herein may contain a Cas9 domain that is capable of binding a nucleotide sequence that does not contain a canonical (e.g., NGG) PAM sequence. Cas9 domains that bind to non-canonical PAM sequences have been described in the art and would be apparent to the skilled artisan. For example, Cas9 domains that bind non-canonical PAM sequences have been described in Kleinstiver et al., “Engineered CRISPR-Cas9 nucleases with altered PAM specificities” Nature 523, 481-485 (2015); and Kleinstiver et al., “Broadening the targeting range of Staphylococcus aureus CRISPR-Cas9 by modifying PAM recognition” Nature Biotechnology 33, 1293-1298 (2015); the entire contents of each are hereby incorporated by reference. In addition, evolved, recombinant Cas9 domains with broadened PAM exclusivity are described in International Patent Application No. PCT/US2016/058345, filed Oct. 22, 2016, published as WO2017/070633 on Apr. 27, 2017, entitled “Evolved Cas9 Proteins for Gene Editing,” the entire contents of which is incorporated herein by reference.

Exemplary SpCas9
(SEQ ID NO: 261)
DKKYSIGLDIGTNSVGWAVITDEYKVPSKKFKVLGNIDRHSIKKNLIGALLFDSGETAEATRLKRTARRRYTRR
KNRICYLQEIFSNEMAKVDDSFFHRLEESFLVEEDKKHERHPIFGNIVDEVAYHEKYPTIYHLRKKLVDSTDKA
DLRLIYLALAHMIKFRGHFLIEGDLNPDNSDVDKLFIQLVQTYNQLFEENPINASGVDAKAILSARLSKSRRLE
NLIAQLPGEKKNGLFGNLIALSLGLIPNEKSNFDLAEDAKLQLSKDTYDDDLDNLLAQIGDQYADLFLAAKNLS
DAILLSDILRVNTEITKAPLSASMIKRYDEHHQDLTLLKALVRQQLPEKYKEIFFDQSKNGYAGYIDGGASQEE
FYKFIKPILEKMDGTEELLVKLNREDLLRKQRTFDNGSIPHQIHLGELHAILRRQEDFYPFLKDNREKIEKILT
FRIPYYVGPLARGNSRFAWMTRKSEETITPWNFEEVVDKGASAQSFIERMTNFDKNLPNEKVLPKHSLLYEYFT
VYNELTKVKYVTEGMRKPAFLSGEQKKAIVDLLFKTNRKVTVKQLKEDYFKKIECFDSVEISGVEDRFNASLGT
YHDLLKIIKDKDFLDNEENEDILEDIVLTLTLFEDREMIEERLKTYAHLFDDKVMKQLKRRRYTGWGRLSRKLI
NGIRDKQSGKTILDFLKSDGFANRNFMQLIHDDSLTFKEDIQKAQVSGQGDSLHEHIANLAGSPAIKKGILQTV
KVVDELVKVMGRHKPENIVIEMARENQTTQKGQKNSRERMKRIEEGIKELGSQILKEHPVENTQLQNEKLYLYY
LQNGRDMYVDQELDINRLSDYDVDHIVPQSFLKDDSIDNKVLTRSDKNRGKSDNVPSEEVVKKMKNYWRQLLNA
KLITQRKFDNLTKAERGGLSELDKAGFIKRQLVETRQITKHVAQILDSRMNTKYDENDKLIREVKVITLKSKLV
SDFRKDFQFYKVREINNYHHAHDAYLNAVVGIALIKKYPKLESEFVYGDYKVYDVRKMIAKSEQEIGKATAKYF
FYSNIMNFEKTEITLANGEIRKRPLIETNGETGEIVWDKGRDFATVRKVLSMPQVNIVKKTEVQTGGESKESIL
PKRNSDKLIARKKDWDPKKYGGFDSPIVAYSVLVVAKVEKGKSKKLKSVKELLGITIMERSSFEKNPIDFLEAK
GYKEVKKDLIIKLPKYSLFELENGRKRMLASAGELQKGNELALPSKYVNFLYLASHYEKLKGSPEDNEQKQLFV
EQHKHYLDEIIEQISEFSKRVILADANLDKVLSAYNKHRDKPIREQAENIIHLFTLINLGAPAAFKYFDTTIDR
KRYISTKEVLDATLIHQSITGLYETRIDLSQLGGD
Exemplary SpCas9n
(SEQ ID NO: 262)
DKKYSIGLAIGTNSVGWAVITDEYKVPSKKFKVLGNIDRHSIKKNLIGALLFDSGETAEATRLKRTARRRYTRR
KNRICYLQEIFSNEMAKVDDSFFHRLEESFLVEEDKKHERHPIFGNIVDEVAYHEKYPTIYHLRKKLVDSTDKA
DLRLIYLALAHMIKFRGHFLIEGDLNPDNSDVDKLFIQLVQTYNQLFEENPINASGVDAKAILSARLSKSRRLE
NLIAQLPGEKKNGLFGNLIALSLGLIPNEKSNFDLAEDAKLQLSKDTYDDDLDNLLAQIGDQYADLFLAAKNLS
DAILLSDILRVNTEITKAPLSASMIKRYDEHHQDLTLLKALVRQQLPEKYKEIFFDQSKNGYAGYIDGGASQEE
FYKFIKPILEKMDGTEELLVKLNREDLLRKQRTFDNGSIPHQIHLGELHAILRRQEDFYPFLKDNREKIEKILT
FRIPYYVGPLARGNSRFAWMTRKSEETITPWNFEEVVDKGASAQSFIERMTNFDKNLPNEKVLPKHSLLYEYFT
VYNELTKVKYVTEGMRKPAFLSGEQKKAIVDLLFKTNRKVTVKQLKEDYFKKIECFDSVEISGVEDRFNASLGT
YHDLLKIIKDKDFLDNEENEDILEDIVLTLTLFEDREMIEERLKTYAHLFDDKVMKQLKRRRYTGWGRLSRKLI
NGIRDKQSGKTILDFLKSDGFANRNFMQLIHDDSLTFKEDIQKAQVSGQGDSLHEHIANLAGSPAIKKGILQTV
KVVDELVKVMGRHKPENIVIEMARENQTTQKGQKNSRERMKRIEEGIKELGSQILKEHPVENTQLQNEKLYLYY
LQNGRDMYVDQELDINRLSDYDVDHIVPQSFLKDDSIDNKVLTRSDKNRGKSDNVPSEEVVKKMKNYWRQLLNA
KLITQRKFDNLTKAERGGLSELDKAGFIKRQLVETRQITKHVAQILDSRMNTKYDENDKLIREVKVITLKSKLV
SDFRKDFQFYKVREINNYHHAHDAYLNAVVGIALIKKYPKLESEFVYGDYKVYDVRKMIAKSEQEIGKATAKYF
FYSNIMNFEKTEITLANGEIRKRPLIETNGETGEIVWDKGRDFATVRKVLSMPQVNIVKKTEVQTGGESKESIL
PKRNSDKLIARKKDWDPKKYGGFDSPTVAYSVLVVAKVEKGKSKKLKSVKELLGITIMERSSFEKNPIDFLEAK
GYKEVKKDLIIKLPKYSLFELENGRKRMLASAGELQKGNELALPSKYVNFLYLASHYEKLKGSPEDNEQKQLFV
EQHKHYLDEIIEQISEFSKRVILADANLDKVLSAYNKHRDKPIREQAENIIHLFTLINLGAPAAFKYFDTTIDR
KRYISTKEVLDATLIHQSITGLYETRIDLSQLGGD
Exemplary SpEQR Cas9
(SEQ ID NO: 263)
DKKYSIGLAIGTNSVGWAVITDEYKVPSKKFKVLGNIDRHSIKKNLIGALLFDSGETAEATRLKRTARRRYTRR
KNRICYLQEIFSNEMAKVDDSFFHRLEESFLVEEDKKHERHPIFGNIVDEVAYHEKYPTIYHLRKKLVDSTDKA
DLRLIYLALAHMIKFRGHFLIEGDLNPDNSDVDKLFIQLVQTYNQLFEENPINASGVDAKAILSARLSKSRRLE
NLIAQLPGEKKNGLFGNLIALSLGLIPNEKSNFDLAEDAKLQLSKDTYDDDLDNLLAQIGDQYADLFLAAKNLS
DAILLSDILRVNTEITKAPLSASMIKRYDEHHQDLTLLKALVRQQLPEKYKEIFFDQSKNGYAGYIDGGASQEE
FYKFIKPILEKMDGTEELLVKLNREDLLRKQRTFDNGSIPHQIHLGELHAILRRQEDFYPFLKDNREKIEKILT
FRIPYYVGPLARGNSRFAWMTRKSEETITPWNFEEVVDKGASAQSFIERMTNFDKNLPNEKVLPKHSLLYEYFT
VYNELTKVKYVTEGMRKPAFLSGEQKKAIVDLLFKTNRKVTVKQLKEDYFKKIECFDSVEISGVEDRFNASLGT
YHDLLKIIKDKDFLDNEENEDILEDIVLTLTLFEDREMIEERLKTYAHLFDDKVMKQLKRRRYTGWGRLSRKLI
NGIRDKQSGKTILDFLKSDGFANRNFMQLIHDDSLTFKEDIQKAQVSGQGDSLHEHIANLAGSPAIKKGILQTV
KVVDELVKVMGRHKPENIVIEMARENQTTQKGQKNSRERMKRIEEGIKELGSQILKEHPVENTQLQNEKLYLYY
LQNGRDMYVDQELDINRLSDYDVDHIVPQSFLKDDSIDNKVLTRSDKNRGKSDNVPSEEVVKKMKNYWRQLLNA
KLITQRKFDNLTKAERGGLSELDKAGFIKRQLVETRQITKHVAQILDSRMNTKYDENDKLIREVKVITLKSKLV
SDFRKDFQFYKVREINNYHHAHDAYLNAVVGIALIKKYPKLESEFVYGDYKVYDVRKMIAKSEQEIGKATAKYF
FYSNIMNFEKTEITLANGEIRKRPLIETNGETGEIVWDKGRDFATVRKVLSMPQVNIVKKTEVQTGGESKESIL
PKRNSDKLIARKKDWDPKKYGGFESPTVAYSVLVVAKVEKGKSKKLKSVKELLGITIMERSSFEKNPIDFLEAK
GYKEVKKDLIIKLPKYSLFELENGRKRMLASAGELQKGNELALPSKYVNFLYLASHYEKLKGSPEDNEQKQLFV
EQHKHYLDEIIEQISEFSKRVILADANLDKVLSAYNKHRDKPIREQAENIIHLFTLINLGAPAAFKYFDTTIDR
KQYRSTKEVLDATLIHQSITGLYETRIDLSQLGGD
Residues E1134, Q1334, and R1336 of SEQ ID NO: 4278, which can be mutated
from D1134, R1334, and T1336 of SEQ ID NO: 4278 to yield a SpEQR Cas9, are
underlined and in bold.
Exemplary SpVQR Cas9
(SEQ ID NO: 264)
DKKYSIGLAIGTNSVGWAVITDEYKVPSKKFKVLGNIDRHSIKKNLIGALLFDSGETAEATRLKRTARRRYTRR
KNRICYLQEIFSNEMAKVDDSFFHRLEESFLVEEDKKHERHPIFGNIVDEVAYHEKYPTIYHLRKKLVDSTDKA
DLRLIYLALAHMIKFRGHFLIEGDLNPDNSDVDKLFIQLVQTYNQLFEENPINASGVDAKAILSARLSKSRRLE
NLIAQLPGEKKNGLFGNLIALSLGLIPNEKSNFDLAEDAKLQLSKDTYDDDLDNLLAQIGDQYADLFLAAKNLS
DAILLSDILRVNTEITKAPLSASMIKRYDEHHQDLTLLKALVRQQLPEKYKEIFFDQSKNGYAGYIDGGASQEE
FYKFIKPILEKMDGTEELLVKLNREDLLRKQRTFDNGSIPHQIHLGELHAILRRQEDFYPFLKDNREKIEKILT
FRIPYYVGPLARGNSRFAWMTRKSEETITPWNFEEVVDKGASAQSFIERMTNFDKNLPNEKVLPKHSLLYEYFT
VYNELTKVKYVTEGMRKPAFLSGEQKKAIVDLLFKTNRKVTVKQLKEDYFKKIECFDSVEISGVEDRFNASLGT
YHDLLKIIKDKDFLDNEENEDILEDIVLTLTLFEDREMIEERLKTYAHLFDDKVMKQLKRRRYTGWGRLSRKLI
NGIRDKQSGKTILDFLKSDGFANRNFMQLIHDDSLTFKEDIQKAQVSGQGDSLHEHIANLAGSPAIKKGILQTV
KVVDELVKVMGRHKPENIVIEMARENQTTQKGQKNSRERMKRIEEGIKELGSQILKEHPVENTQLQNEKLYLYY
LQNGRDMYVDQELDINRLSDYDVDHIVPQSFLKDDSIDNKVLTRSDKNRGKSDNVPSEEVVKKMKNYWRQLLNA
KLITQRKFDNLTKAERGGLSELDKAGFIKRQLVETRQITKHVAQILDSRMNTKYDENDKLIREVKVITLKSKLV
SDFRKDFQFYKVREINNYHHAHDAYLNAVVGIALIKKYPKLESEFVYGDYKVYDVRKMIAKSEQEIGKATAKYF
FYSNIMNFEKTEITLANGEIRKRPLIETNGETGEIVWDKGRDFATVRKVLSMPQVNIVKKTEVQTGGESKESIL
PKRNSDKLIARKKDWDPKKYGGFVSPTVAYSVLVVAKVEKGKSKKLKSVKELLGITIMERSSFEKNPIDFLEAK
GYKEVKKDLIIKLPKYSLFELENGRKRMLASAGELQKGNELALPSKYVNFLYLASHYEKLKGSPEDNEQKQLFV
EQHKHYLDEIIEQISEFSKRVILADANLDKVLSAYNKHRDKPIREQAENIIHLFTLINLGAPAAFKYFDTTIDR
KQYRSTKEVLDATLIHQSITGLYETRIDLSQLGGD
Residues V1134, Q1334, and R1336 of SEQ ID NO: 4279, which can be mutated
from D1134, R1334, and T1336 of SEQ ID NO: 4279 to yield a SpVQR Cas9, are
underlined and in bold.
Exemplary SpVRER Cas9
DKKYSIGLAIGTNSVGWAVITDEYKVPSKKFKVLGNIDRHSIKKNLIGALLFDSGETAEATRLKRTARRRYTRR
KNRICYLQEIFSNEMAKVDDSFFHRLEESFLVEEDKKHERHPIFGNIVDEVAYHEKYPTIYHLRKKLVDSTDKA
DLRLIYLALAHMIKFRGHFLIEGDLNPDNSDVDKLFIQLVQTYNQLFEENPINASGVDAKAILSARLSKSRRLE
NLIAQLPGEKKNGLFGNLIALSLGLIPNEKSNFDLAEDAKLQLSKDTYDDDLDNLLAQIGDQYADLFLAAKNLS
DAILLSDILRVNTEITKAPLSASMIKRYDEHHQDLILLKALVRQQLPEKYKEIFFDQSKNGYAGYIDGGASQEE
FYKFIKPILEKMDGTEELLVKLNREDLLRKQRTFDNGSIPHQIHLGELHAILRRQEDFYPFLKDNREKIEKILT
FRIPYYVGPLARGNSRFAWMTRKSEETITPWNFEEVVDKGASAQSFIERMINFDKNLPNEKVLPKHSLLYEYFT
VYNELTKVKYVTEGMRKPAFLSGEQKKAIVDLLFKINRKVTVKQLKEDYFKKIECFDSVEISGVEDRFNASLGT
YHDLLKIIKDKDFLDNEENEDILEDIVLILTLFEDREMIEERLKTYAHLFDDKVMKQLKRRRYTGWGRLSRKLI
NGIRDKQSGKTILDFLKSDGFANRNFMQLIHDDSLIFKEDIQKAQVSGQGDSLHEHIANLAGSPAIKKGILQTV
KVVDELVKVMGRHKPENIVIEMARENQTTQKGQKNSRERMKRIEEGIKELGSQILKEHPVENTQLQNEKLYLYY
LQNGRDMYVDQELDINRLSDYDVDHIVPQSFLKDDSIDNKVLIRSDKNRGKSDNVPSEEVVKKMKNYWRQLLNA
KLITQRKFDNLTKAERGGLSELDKAGFIKRQLVETRQIIKHVAQILDSRMNTKYDENDKLIREVKVITLKSKLV
SDFRKDFQFYKVREINNYHHAHDAYLNAVVGIALIKKYPKLESEFVYGDYKVYDVRKMIAKSEQEIGKATAKYF
FYSNIMNFEKTEITLANGEIRKRPLIETNGETGEIVWDKGRDFATVRKVLSMPQVNIVKKTEVQTGGESKESIL
PKRNSDKLIARKKDWDPKKYGGFVSPTVAYSVLVVAKVEKGKSKKLKSVKELLGITIMERSSFEKNPIDFLEAK
GYKEVKKDLIIKLPKYSLFELENGRKRMLASARELQKGNELALPSKYVNFLYLASHYEKLKGSPEDNEQKQLFV
EQHKHYLDEIIEQISEFSKRVILADANLDKVLSAYNKHRDKPIREQAENIIHLFTLINLGAPAAFKYFDTTIDR
KEYRSTKEVLDATLIHQSITGLYETRIDLSQLGGD (SEQ ID NO: 265; residues V1134, R1217,
Q1334, and R1336 of SEQ ID NO: 265, which can be mutated from D1134, G1217,
R1334, and T1336 of SEQ ID NO: 265 to yield a SpVRER Cas9, are
underlined and in bold.)

[0316] In some embodiments, the Cas9 domain comprises an amino acid sequence that is at least 60%, at least 65%, at least 70%, at least 75%, at least 80%, at least 85%, at least 90%, at least 95%, at least 96%, at least 97%, at least 98%, at least 99%, or at least 99.5% identical to any one of SEQ ID NOs: 261-265. In some embodiments, the Cas9 domain comprises the amino acid sequence of any one of SEQ ID NOs: 261-265. In some embodiments, the Cas9 domain consists of the amino acid sequence of any one of SEQ ID NOs: 261-265.

[0317] In some embodiments, the Cas9 domain of any of the fusion proteins provided herein comprises an amino acid sequence that is at least 60%, at least 65%, at least 70%, at least 75%, at least 80%, at least 85%, at least 90%, at least 95%, at least 96%, at least 97%, at least 98%, at least 99%, or at least 99.5% identical to any one of SEQ ID NOs: 261-265. In some embodiments, the Cas9 domain of any of the fusion proteins provided herein comprises the amino acid sequence of any one of SEQ ID NOs: 261-265. In some embodiments, the Cas9 domain of any of the fusion proteins provided herein consists of the amino acid sequence of any one of SEQ ID NOs: 261-265. Exemplary, non-limiting examples of fusion proteins comprising a Cas9 domain comprising the amino acid sequence of any one of SEQ ID NOs: 261-265 are described in International Patent Application No. PCT/US2016/058344, filed Oct. 22, 2016, and published as Publication No. WO2017/070632 on Apr. 27, 2017, the entire contents of which are incorporated herein by reference.

[0318] In some embodiments, the Cas9 domain is a Cas9 domain from Streptococcus pyogenes (SpCas9). In some embodiments, the SpCas9 domain is a nuclease active SpCas9, a nuclease inactive SpCas9 (SpCas9d), or a SpCas9 nickase (SpCas9n). In some embodiments, the SpCas9 comprises the amino acid sequence SEQ ID NO: 261. In some embodiments, the SpCas9 comprises a D9X mutation of SEQ ID NO: 261, or a corresponding mutation in any of the amino acid sequences provided in SEQ ID NOs: 10-260, wherein X is any amino acid except for D. In some embodiments, the SpCas9 comprises a D9A mutation of SEQ ID NO: 261, or a corresponding mutation in any of the amino acid sequences provided in SEQ ID NOs: 10-260. In some embodiments, the SpCas9 domain, the SpCas9d domain, or the SpCas9n domain can bind to a nucleic acid sequence having a non-canonical PAM. In some embodiments, the SpCas9 domain, the SpCas9d domain, or the SpCas9n domain can bind to a nucleic acid sequence having a NGG, a NGA, or a NGCG PAM sequence. In some embodiments, the SpCas9 domain comprises one or more of a D1134X, a R1334X, and a T1336X mutation of SEQ ID NO: 4276, or a corresponding mutation in any of the amino acid sequences provided in SEQ ID NOs: 11-260, wherein X is any amino acid. In some embodiments, the SpCas9 domain comprises one or more of a D1134E, R1334Q, and T1336R mutation of SEQ ID NO: 4276, or a corresponding mutation in any of the amino acid sequences provided in SEQ ID NOs: 11-260. In some embodiments, the SpCas9 domain comprises a D1134E, a R1334Q, and a T1336R mutation of SEQ ID NO: 4276, or corresponding mutations in any of the amino acid sequences provided in SEQ ID NOs: 11-260. In some embodiments, the SpCas9 domain comprises one or more of a D1134X, a R1334X, and a T1336X mutation of SEQ ID NO: 4276, or a corresponding mutation in any of the amino acid sequences provided in SEQ ID NOs: 11-260, wherein X is any amino acid. In some embodiments, the SpCas9 domain comprises one or more of a D1134V, a R1334Q, and a T1336R mutation of SEQ ID NO: 4276, or a corresponding mutation in any of the amino acid sequences provided in SEQ ID NOs: 11-260. In some embodiments, the SpCas9 domain comprises a D1134V, a R1334Q, and a T1336R mutation of SEQ ID NO: 4276, or corresponding mutations in any of the amino acid sequences provided in SEQ ID NOs: 11-260. In some embodiments, the SpCas9 domain comprises one or more of a D1134X, a G1217X, a R1334X, and a T1336X mutation of SEQ ID NO: 4276, or a corresponding mutation in any of the amino acid sequences provided in SEQ ID NOs: 11-260, wherein X is any amino acid. In some embodiments, the SpCas9 domain comprises one or more of a D1134V, a G1217R, a R1334Q, and a T1336R mutation of SEQ ID NO: 4276, or a corresponding mutation in any of the amino acid sequences provided in SEQ ID NOs: 11-260. In some embodiments, the SpCas9 domain comprises a D1134V, a G1217R, a R1334Q, and a T1336R mutation of SEQ ID NO: 4276, or corresponding mutations in any of the amino acid sequences provided in SEQ ID NOs: 11-260.

[0319] In some embodiments, the Cas9 domain is a Cas9 domain from Staphylococcus aureus (SaCas9). In some embodiments, the SaCas9 domain is a nuclease active SaCas9, a nuclease inactive SaCas9 (SaCas9d), or a SaCas9 nickase (SaCas9n). In some embodiments, the SaCas9 comprises the amino acid sequence SEQ ID NO: 266. In some embodiments, the SaCas9 comprises a N579X mutation of SEQ ID NO: 266, or a corresponding mutation in any of the amino acid sequences provided in SEQ ID NOs: 10-260, wherein X is any amino acid except for N. In some embodiments, the SaCas9 comprises a N579A mutation of SEQ ID NO: 266, or a corresponding mutation in any of the amino acid sequences provided in SEQ ID NOs: 10-260. In some embodiments, the SaCas9 domain, the SaCas9d domain, or the SaCas9n domain can bind to a nucleic acid sequence having a non-canonical PAM. In some embodiments, the SaCas9 domain, the SaCas9d domain, or the SaCas9n domain can bind to a nucleic acid sequence having a NNGRRT PAM sequence. In some embodiments, the SaCas9 domain comprises one or more of a E781X, a N967X, and a R1014X mutation of SEQ ID NO: 266, or a corresponding mutation in any of the amino acid sequences provided in SEQ ID NOs: 10-260, wherein X is any amino acid. In some embodiments, the SaCas9 domain comprises one or more of a E781K, a N967K, and a R1014H mutation of SEQ ID NO: 266, or one or more corresponding mutation in any of the amino acid sequences provided in SEQ ID NOs: 10-260. In some embodiments, the SaCas9 domain comprises a E781K, a N967K, or a R1014H mutation of SEQ ID NO: 266, or corresponding mutations in any of the amino acid sequences provided in SEQ ID NOs: 10-260.

[0320] In some embodiments, the Cas9 domain comprises an amino acid sequence that is at least 60%, at least 65%, at least 70%, at least 75%, at least 80%, at least 85%, at least 90%, at least 95%, at least 96%, at least 97%, at least 98%, at least 99%, or at least 99.5% identical to any one of SEQ ID NOs: 266-268. In some embodiments, the Cas9 domain comprises the amino acid sequence of any one of SEQ ID NOs: 266-268. In some embodiments, the Cas9 domain consists of the amino acid sequence of any one of SEQ ID NOs: 266-268.

[0321] In some embodiments, the Cas9 domain of any of the fusion proteins provided herein comprises an amino acid sequence that is at least 60%, at least 65%, at least 70%, at least 75%, at least 80%, at least 85%, at least 90%, at least 95%, at least 96%, at least 97%, at least 98%, at least 99%, or at least 99.5% identical to any one of SEQ ID NOs: 266-268. In some embodiments, the Cas9 domain of any of the fusion proteins provided herein comprises the amino acid sequence of any one of SEQ ID NOs: 266-268. In some embodiments, the Cas9 domain of any of the fusion proteins provided herein consists of the amino acid sequence of any one of SEQ ID NOs: 266-268. Exemplary, non-limiting examples of fusion proteins comprising a Cas9 domain comprising the amino acid sequence of any one of SEQ ID NOs: 266-268 are described in International Patent Application No. PCT/US2016/058344, filed Oct. 22, 2016, and published as Publication No. WO2017/070632 on Apr. 27, 2017, the entire contents of which are incorporated herein by reference.

Exemplary SaCas9 sequence
(SEQ ID NO: 266)
KRNYILGLDIGITSVGYGIIDYETRDVIDAGVRLFKEANVENNEGRRSKRGARRLKRRRRHRIQRVKKLLFDYN
LLTDHSELSGINPYEARVKGLSQKLSEEEFSAALLHLAKRRGVHNVNEVEEDIGNELSTKEQISRNSKALEEKY
VAELQLERLKKDGEVRGSINRFKISDYVKEAKQLLKVQKAYHQLDQSFIDTYIDLLETRRTYYEGPGEGSPFGW
KDIKEWYEMLMGHCTYFPEELRSVKYAYNADLYNALNDLNNLVITRDENEKLEYYEKFQIIENVFKQKKKPTLK
QIAKEILVNEEDIKGYRVTSTGKPEFTNLKVYHDIKDITARKEIIENAELLDQIAKILTIYQSSEDIQEELTNL
NSELTQEEIEQISNLKGYIGTHNLSLKAINLILDELWHINDNQIAIFNRLKLVPKKVDLSQQKEIPTILVDDFI
LSPVVKRSFIQSIKVINAIIKKYGLPNDIIIELAREKNSKDAQKMINEMQKRNRQTNERIEEIIRTIGKENAKY
LIEKIKLHDMQEGKCLYSLEAIPLEDLLNNPFNYEVDHIIPRSVSFDNSFNNKVLVKQEENSKKGNRIPFQYLS
SSDSKISYETFKKHILNLAKGKGRISKTKKEYLLEERDINRFSVQKDFINRNLVDTRYATRGLMNLLRSYFRVN
NLDVKVKSINGGFTSFLRRKWKFKKERNKGYKHHAEDALIIANADFIFKEWKKLDKAKKVMENQMFEEKQAESM
PEIETEQEYKEIFITPHQIKHIKDFKDYKYSHRVDKKPNRELINDTLYSTRKDDKGNTLIVNNLNGLYDKDNDK
LKKLINKSPEKLLMYHHDPQTYQKLKLIMEQYGDEKNPLYKYYEEIGNYLIKYSKKDNGPVIKKIKYYGNKLNA
HLDITDDYPNSRNKVVKLSLKPYREDVYLDNGVYKEVTVKNLDVIKKENYYEVNSKCYEEAKKLKKISNQAEFI
ASFYNNDLIKINGELYRVIGVNNDLLNRIEVNMIDITYREYLENMNDKRPPRIIKTIASKTQSIKKYSTDILGN
LYEVKSKKHPQIIKKG
Residue N579 of SEQ ID NO: 266, which is underlined and in bold, may be mutated
(e.g., to a A579) to yield a SaCas9 nickase.
Exemplary SaCas9n sequence
(SEQ ID NO: 267)
KRNYILGLDIGITSVGYGIIDYETRDVIDAGVRLFKEANVENNEGRRSKRGARRLKRRRRHRIQRVKKLLFDYN
LLTDHSELSGINPYEARVKGLSQKLSEEEFSAALLHLAKRRGVHNVNEVEEDIGNELSTKEQISRNSKALEEKY
VAELQLERLKKDGEVRGSINRFKISDYVKEAKQLLKVQKAYHQLDQSFIDTYIDLLETRRTYYEGPGEGSPFGW
KDIKEWYEMLMGHCTYFPEELRSVKYAYNADLYNALNDLNNLVITRDENEKLEYYEKFQIIENVFKQKKKPTLK
QIAKEILVNEEDIKGYRVTSTGKPEFTNLKVYHDIKDITARKEIIENAELLDQIAKILTIYQSSEDIQEELTNL
NSELTQEEIEQISNLKGYIGTHNLSLKAINLILDELWHINDNQIAIFNRLKLVPKKVDLSQQKEIPTILVDDFI
LSPVVKRSFIQSIKVINAIIKKYGLPNDIIIELAREKNSKDAQKMINEMQKRNRQTNERIEEIIRTIGKENAKY
LIEKIKLHDMQEGKCLYSLEAIPLEDLLNNPFNYEVDHIIPRSVSFDNSFNNKVLVKQEEASKKGNRIPFQYLS
SSDSKISYETFKKHILNLAKGKGRISKTKKEYLLEERDINRFSVQKDFINRNLVDTRYATRGLMNLLRSYFRVN
NLDVKVKSINGGFTSFLRRKWKFKKERNKGYKHHAEDALIIANADFIFKEWKKLDKAKKVMENQMFEEKQAESM
PEIETEQEYKEIFITPHQIKHIKDFKDYKYSHRVDKKPNRELINDTLYSTRKDDKGNTLIVNNLNGLYDKDNDK
LKKLINKSPEKLLMYHHDPQTYQKLKLIMEQYGDEKNPLYKYYEEIGNYLIKYSKKDNGPVIKKIKYYGNKLNA
HLDITDDYPNSRNKVVKLSLKPYREDVYLDNGVYKEVTVKNLDVIKKENYYEVNSKCYEEAKKLKKISNQAEFI
ASFYNNDLIKINGELYRVIGVNNDLLNRIEVNMIDITYREYLENMNDKRPPRIIKTIASKTQSIKKYSTDILGN
LYEVKSKKHPQIIKKG.
Residue A579 of SEQ ID NO: 267, which can be mutated from N579 of SEQ ID NO: 266
to yield a SaCas9 nickase, is underlined and in bold.
Exemplary SaKKH Cas9
(SEQ ID NO: 268)
KRNYILGLDIGITSVGYGIIDYETRDVIDAGVRLFKEANVENNEGRRSKRGARRLKRRRRHRIQRVKKLLFDYN
LLTDHSELSGINPYEARVKGLSQKLSEEEFSAALLHLAKRRGVHNVNEVEEDIGNELSTKEQISRNSKALEEKY
VAELQLERLKKDGEVRGSINRFKISDYVKEAKQLLKVQKAYHQLDQSFIDTYIDLLETRRTYYEGPGEGSPFGW
KDIKEWYEMLMGHCTYFPEELRSVKYAYNADLYNALNDLNNLVITRDENEKLEYYEKFQIIENVFKQKKKPTLK
QIAKEILVNEEDIKGYRVTSTGKPEFTNLKVYHDIKDITARKEIIENAELLDQIAKILTIYQSSEDIQEELTNL
NSELTQEEIEQISNLKGYIGTHNLSLKAINLILDELWHINDNQIAIFNRLKLVPKKVDLSQQKEIPTILVDDFI
LSPVVKRSFIQSIKVINAIIKKYGLPNDIIIELAREKNSKDAQKMINEMQKRNRQTNERIEEIIRTIGKENAKY
LIEKIKLHDMQEGKCLYSLEAIPLEDLLNNPFNYEVDHIIPRSVSFDNSFNNKVLVKQEEASKKGNRIPFQYLS
SSDSKISYETFKKHILNLAKGKGRISKTKKEYLLEERDINRFSVQKDFINRNLVDTRYATRGLMNLLRSYFRVN
NLDVKVKSINGGFTSFLRRKWKFKKERNKGYKHHAEDALIIANADFIFKEWKKLDKAKKVMENQMFEEKQAESM
PEIETEQEYKEIFITPHQIKHIKDFKDYKYSHRVDKKPNRKLINDTLYSTRKDDKGNTLIVNNLNGLYDKDNDK
LKKLINKSPEKLLMYHHDPQTYQKLKLIMEQYGDEKNPLYKYYEEIGNYLIKYSKKDNGPVIKKIKYYGNKLNA
HLDITDDYPNSRNKVVKLSLKPYREDVYLDNGVYKEVTVKNLDVIKKENYYEVNSKCYEEAKKLKKISNQAEFI
ASFYKNDLIKINGELYRVIGVNNDLLNRIEVNMIDITYREYLENMNDKRPPHIIKTIASKTQSIKKYSTDILGN
LYEVKSKKHPQIIKKG.
Residue A579 of SEQ ID NO: 268, which can be mutated from N579 of SEQ ID NO: 266
to yield a SaCas9 nickase, is underlined and in bold. Residues K781, K967, and
H1014 of SEQ ID NO: 268, which can be mutated from E781, N967, and R1014 of SEQ
ID NO: 266 to yield a SaKKH Cas9 are underlined and in italics.

napDNAbp Complexes with Guide RNAs

[0322] Some aspects of this disclosure provide complexes comprising any of the nucleic acid programmable DNA binding proteins (napDNAbps) provided herein, and a guide RNA bound to the napDNAbp. In some embodiments, the napDNAbp comprises a Cas9 domain ((e.g., a dCas9 domain, a nuclease active Cas9 domain domain, or a Cas9 nickase). In some embodiments, this disclosure provide complexes comprising any of the Cas9 domains provided herein, and a guide RNA (gRNA or sgRNA) bound to the Cas9 domain.

[0323] Some aspects of this disclosure provide complexes comprising any of the fusion proteins (e.g., a fusion protein comprising a napDNAbp and a nucleic acid editing domain) provided herein, and a guide RNA bound to the napDNAbp. In some embodiments, the fusion protein comprises a Cas9 domain (e.g., a dCas9, a nuclease active Cas9, or a Cas9 nickase), and a guide RNA bound to the Cas9 domain of the fusion protein.

[0324] In some embodiments, the guide RNA is from 15-100 nucleotides long and comprises a sequence of at least 10 contiguous nucleotides that is complementary to a target sequence. In some embodiments, the guide RNA is 15, 16, 17, 18, 19, 20, 21, 22, 23, 24, 25, 26, 27, 28, 29, 30, 31, 32, 33, 34, 35, 36, 37, 38, 39, 40, 41, 42, 43, 44, 45, 46, 47, 48, 49, or 50 nucleotides long. In some embodiments, the guide RNA comprises a sequence of 15, 16, 17, 18, 19, 20, 21, 22, 23, 24, 25, 26, 27, 28, 29, 30, 31, 32, 33, 34, 35, 36, 37, 38, 39, or 40 contiguous nucleotides that is complementary to a target sequence. In some embodiments, the guide RNA comprises a spacer sequence comprising the nucleic acid sequence of any one of SEQ ID NOs: 600-608 (see Table 5). In some embodiments, the target sequence is a DNA sequence.

[0325] In some embodiments, the target sequence is a sequence present in a recording plasmid provided herein. In some embodiments, the target sequence is present in a reporter gene. In some embodiments, the reporter gene is EGFP. In some embodiments, the EGFP gene comprises the nucleic acid sequence CCACCGGCAAGCTGCCCGTGCCC (SEQ ID NO: 620). In some embodiments, the EGFP gene comprises the nucleic acid sequence CCTGAGGCCAAGCTGCCCGTGCCC (SEQ ID NO: 621). In some embodiments the target sequence comprises the amino acid sequence CCACCGGCAAGCTGCCCATGCCC (SEQ ID NO: 622). In some embodiments the target sequence comprises the amino acid sequence ACCAGGGCTCCCACCCGGT (SEQ ID NO: 623). In some embodiments the target sequence comprises the amino acid sequence CATCCAGTCCCACCAGGGCTCCCACCCGGTCCC (SEQ ID NO: 624). In some embodiments the target sequence comprises the amino acid sequence CATCCAGTCCCACCAAAACT (SEQ ID NO: 625). In some embodiments the target sequence comprises the amino acid sequence CATCCAGTCCCACCAAAACTCCC (SEQ ID NO: 626). In some embodiments, the target sequence is a sequence present in a gene located in a safe harbor locus. In some embodiments, the target sequence is a sequence in the genome of a prokaryote (e.g., a prokaryotic (e.g., E. coli) cell). In some embodiments, the target sequence is a sequence in the genome of a eukaryote (e.g., in a eukaryotic cell). In some embodiments, the target sequence is a sequence in the genome of a mammal. In some embodiments, the target sequence is a sequence in the genome of a human. In some embodiments, the 3′ end of the target sequence is immediately adjacent to a canonical PAM sequence (NGG). In some embodiments, the guide RNA is complementary to a sequence associated with a disease or disorder. In some embodiments, the target sequence is complementary to a sgRNA sequence provided herein, for example, a sgRNA sequence comprising a nucleic acid sequence shown in Table 5 (SEQ ID NOs: 600-608).

### Nucleic Acid Editing Domains

[0326] Any of the nucleic acid programmable DNA binding proteins (e.g, Cas9 domains (e.g., a nuclease active Cas9 domain, a nuclease-inactive dCas9 domain, or a Cas9 nickase domain) disclosed herein may be fused to a second protein, thus providing fusion proteins that comprise a napDNAbp as provided herein and a second protein, or a “fusion partner.” Without wishing to be bound by any particular theory, fusion proteins comprising a nucleic acid editing domain are useful inter alia for targeted editing, referred to herein as “base editing,” of nucleic acid sequences in vitro and in vivo.

[0327] In some embodiments, the second protein in the fusion protein (i.e., the fusion partner) comprises a nucleic acid editing domain. Such a nucleic acid editing domain may be, without limitation, a nuclease, a nickase, a recombinase, a deaminase, a methyltransferase, a methylase, an acetylase, or an acetyltransferase. Non-limiting exemplary nucleic acid editing domains that may be used in accordance with this disclosure include cytidine deaminases and adenosine deaminases. In some embodiments, the nucleic acid editing domain is a deaminase domain. In some embodiments, the nucleic acid editing domain is a nuclease domain. In some embodiments, the nucleic acid editing domain is a nickase domain. In some embodiments, the nucleic acid editing domain is a recombinase domain. In some embodiments, the nucleic acid editing domain is a methyltransferase domain. In some embodiments, the nucleic acid editing domain is a methylase domain. In some embodiments, the nucleic acid editing domain is an acetylase domain. In some embodiments, the nucleic acid editing domain is an acetyltransferase domain.

[0328] In some embodiments, the deaminase domain is a cytidine deaminase domain. A cytidine deaminase domain may also be referred to interchangeably as a cytosine deaminase domain. In some embodiments, the cytidine deaminase catalyzes the hydrolytic deamination of cytidine (C) or deoxycytidine (dC) to uridine (U) or deoxyuridine (dU), respectively. In some embodiments, the cytidine deaminase domain catalyzes the hydrolytic deamination of cytosine (C) to uracil (U). In some embodiments, the cytidine deaminase catalyzes the hydrolytic deamination of cytidine or cytosine in deoxyribonucleic acid (DNA). Without wishing to be bound by any particular theory, fusion proteins comprising a cytidine deaminase are useful inter alia for targeted editing, referred to herein as “base editing,” of nucleic acid sequences in vitro and in vivo.

[0329] One exemplary suitable type of cytidine deaminase is a cytidine deaminase, for example, of the APOBEC family. The apolipoprotein B mRNA-editing complex (APOBEC) family of cytidine deaminase enzymes encompasses eleven proteins that serve to initiate mutagenesis in a controlled and beneficial manner (see, e.g., Conticello S G. The AID/APOBEC family of nucleic acid mutators. Genome Biol. 2008; 9(6):229). One family member, activation-induced cytidine deaminase (AID), is responsible for the maturation of antibodies by converting cytosines in ssDNA to uracils in a transcription-dependent, strand-biased fashion (see, e.g., Reynaud C A, et al. What role for AID: mutator, or assembler of the immunoglobulin mutasome? Nat Immunol. 2003; 4(7):631-638). The apolipoprotein B editing complex 3 (APOBEC3) enzyme provides protection to human cells against a certain HIV-1 strain via the deamination of cytosines in reverse-transcribed viral ssDNA (see, e.g., Bhagwat A S. DNA-cytosine deaminases: from antibody maturation to antiviral defense. DNA Repair (Amst). 2004; 3(1):85-89). These proteins all require a Zn²⁺-coordinating motif (His-X-Glu-X₂₃₋₂₆-Pro-Cys-X₂₋₄-Cys; SEQ ID NO: 800) and bound water molecule for catalytic activity. The Glu residue acts to activate the water molecule to a zinc hydroxide for nucleophilic attack in the deamination reaction. Each family member preferentially deaminates at its own particular “hotspot”, ranging from WRC (W is A or T, R is A or G) for hAID, to TTC for hAPOBEC3F (see, e.g., Navaratnam N and Sarwar R. An overview of cytidine deaminases. Int J Hematol. 2006; 83(3):195-200). A recent crystal structure of the catalytic domain of APOBEC3G revealed a secondary structure comprised of a five-stranded β-sheet core flanked by six α-helices, which is believed to be conserved across the entire family (see, e.g., Holden L G, et al. Crystal structure of the anti-viral APOBEC3G catalytic domain and functional implications. Nature. 2008; 456(7218):121-4). The active center loops have been shown to be responsible for both ssDNA binding and in determining “hotspot” identity (see, e.g., Chelico L, et al. Biochemical basis of immunological and retroviral responses to DNA-targeted cytosine deamination by activation-induced cytidine deaminase and APOBEC3G. J Biol Chem. 2009; 284(41). 27761-5). Overexpression of these enzymes has been linked to genomic instability and cancer, thus highlighting the importance of sequence-specific targeting (see, e.g., Pham P, et al. Reward versus risk: DNA cytidine deaminases triggering immunity and disease. Biochemistry. 2005; 44(8):2703-15).

[0330] Some aspects of this disclosure relate to the recognition that the activity of cytidine deaminase enzymes such as APOBEC enzymes can be directed to a specific site in genomic DNA. Without wishing to be bound by any particular theory, advantages of using a nucleic acid programmable binding protein (e.g., a Cas9 domain) as a recognition agent include (1) the sequence specificity of nucleic acid programmable binding protein (e.g., a Cas9 domain) can be easily altered by simply changing the sgRNA sequence; and (2) the nucleic acid programmable binding protein (e.g., a Cas9 domain) may bind to its target sequence by denaturing the dsDNA, resulting in a stretch of DNA that is single-stranded and therefore a viable substrate for the deaminase. It should be understood that other catalytic domains of napDNAbps, or catalytic domains from other nucleic acid editing proteins, can also be used to generate fusion proteins with Cas9, and that the disclosure is not limited in this regard.

[0331] In view of the results provided herein regarding the nucleotides that can be targeted by Cas9:deaminase fusion proteins, a person of ordinary skill in the art will be able to design suitable guide RNAs to target the fusion proteins to a target sequence that comprises a nucleotide to be deaminated.

[0332] In some embodiments, the cytidine deaminase is an apolipoprotein B mRNA-editing complex (APOBEC) family deaminase. In some embodiments, the cytidine deaminase is an APOBEC1 deaminase. In some embodiments, the cytidine deaminase is an APOBEC2 deaminase. In some embodiments, the cytidine deaminase is an APOBEC3 deaminase. In some embodiments, the cytidine deaminase is an APOBEC3A deaminase. In some embodiments, the cytidine deaminase is an APOBEC3B deaminase. In some embodiments, the cytidine deaminase is an APOBEC3C deaminase. In some embodiments, the cytidine deaminase is an APOBEC3D deaminase. In some embodiments, the cytidine deaminase is an APOBEC3E deaminase. In some embodiments, the cytidine deaminase is an APOBEC3F deaminase. In some embodiments, the cytidine deaminase is an APOBEC3G deaminase. In some embodiments, the cytidine deaminase is an APOBEC3H deaminase. In some embodiments, the cytidine deaminase is an APOBEC4 deaminase. In some embodiments, the cytidine deaminase is an activation-induced deaminase (AID). In some embodiments, the cytidine deaminase is a vertebrate cytidine deaminase. In some embodiments, the cytidine deaminase is an invertebrate cytidine deaminase. In some embodiments, the cytidine deaminase is a human, chimpanzee, gorilla, monkey, cow, dog, rat, or mouse deaminase. In some embodiments, the cytidine deaminase is a human cytidine deaminase. In some embodiments, the cytidine deaminase is a rat cytidine deaminase, e.g., rAPOBEC1. In some embodiments, the cytidine deaminase is a Petromyzon marinus cytidine deaminase 1 (pmCDA1). In some embodiments, the cytidine deaminase is a human APOBEC3G (SEQ ID NO: 359). In some embodiments, the cytidine deaminase is a fragment of the human APOBEC3G (SEQ ID NO: 388). In some embodiments, the deaminase is a human APOBEC3G variant comprising a D316R and D317R mutation (SEQ ID NO: 387). In some embodiments, the deaminase is a fragment of the human APOBEC3G and comprising mutations corresponding to the D316R and D317R mutations in SEQ ID NO: 359 (SEQ ID NO: 389).

[0333] In some embodiments, the nucleic acid editing domain is at least 80%, at least 85%, at least 90%, at least 92%, at least 95%, at least 96%, at least 97%, at least 98%, at least 99%, or at least 99.5% identical to the deaminase domain of any one of SEQ ID NOs: 350-389. In some embodiments, the nucleic acid editing domain comprises the amino acid sequence of any one of SEQ ID NOs: 350-389.

[0334] Some exemplary suitable nucleic-acid editing domains, e.g., cytidine deaminases and cytidine deaminase domains, that can be fused to napDNAbps (e.g., Cas9 domains) according to aspects of this disclosure are provided below. It should be understood that, in some embodiments, the active domain of the respective sequence can be used, e.g., the domain without a localizing signal (nuclear localization sequence, without nuclear export signal, cytoplasmic localizing signal).

Human AID:
(SEQ ID NO: 350)
[sequence omitted]
(underline: nuclear localization sequence; double underline: nuclear export signal)
Mouse AID:
(SEQ ID NO: 351)
MDSLLMKQKKFLYHFKNVRWAKGRHETYLCYVVKRRDSATSCSLDFGHLRNKSGCHVELLFLRYISDWDLDPGR
CYRVTWFTSWSPCYDCARHVAEFLRWNPNLSLRIFTARLYFCEDRKAEPEGLRRLHRAGVQIGIMTFKDYFYCW
NTFVENRERTFKAWEGLHENSVRLTRQLRRILLPLYEVDDLRDAFRMLGF
(underline: nuclear localization sequence; double underline: nuclear export signal)
Dog AID:
(SEQ ID NO: 352)
MDSLLMKQRKFLYHFKNVRWAKGRHETYLCYVVKRRDSATSFSLDFGHLRNKSGCHVELLFLRYISDWDLDPGR
CYRVTWFTSWSPCYDCARHVADFLRGYPNLSLRIFAARLYFCEDRKAEPEGLRRLHRAGVQIAIMTFKDYFYCW
NTFVENREKTFKAWEGLHENSVRLSRQLRRILLPLYEVDDLRDAFRTLGL
(underline: nuclear localization sequence; double underline: nuclear export signal)
Bovine AID:
(SEQ ID NO: 353)
MDSLLKKQRQFLYQFKNVRWAKGRHETYLCYVVKRRDSPTSFSLDFGHLRNKAGCHVELLFLRYISDWDLDPGR
CYRVTWFTSWSPCYDCARHVADFLRGYPNLSLRIFTARLYFCDKERKAEPEGLRRLHRAGVQIAIMTFKDYFYC
WNTFVENHERTFKAWEGLHENSVRLSRQLRRILLPLYEVDDLRDAFRTLGL
(underline: nuclear localization sequence; double underline: nuclear export signal)
Rat AID:
(SEQ ID NO: 374)
MAVGSKPKAALVGPHWERERIWCFLCSTGLGTQQTGQTSRWLRPAATQDPVSPPRSLLMKQRKFLYHFKNVRWA
KGRHETYLCYVVKRRDSATSFSLDFGYLRNKSGCHVELLFLRYISDWDLDPGRCYRVTWFTSWSPCYDCARHVA
DFLRGNPNLSLRIFTARLTGWGALPAGLMSPARPSDYFYCWNTFVENHERTFKAWEGLHENSVRLSRRLRRILL
PLYEVDDLRDAFRTLGL
(underline: nuclear localization sequence; double underline: nuclear export signal)
Mouse APOBEC-3:
(SEQ ID NO: 354)
MGPFCLGCSHRKCYSPIRNLISQETFKFHFKNLGYAKGRKDTFLCYEVTRKDCDSPVSLHHGVFKNKDNIHAEI
CFLYWFHDKVLKVLSPREEFKITWYMSWSPCFECAEQIVRFLATHHNLSLDIFSSRLYNVQDPETQQNLCRLVQ
EGAQVAAMDLYEFKKCWKKFVDNGGRRFRPWKRLLTNFRYQDSKLQEILRPCYIPVPSSSSSTLSNICLTKGLP
ETRFCVEGRRMDPLSEEEFYSQFYNQRVKHLCYYHRMKPYLCYQLEQFNGQAPLKGCLLSEKGKQHAEILFLDK
IRSMELSQVTITCYLTWSPCPNCAWQLAAFKRDRPDLILHIYTSRLYFHWKRPFQKGLCSLWQSGILVDVMDLP
QFTDCWTNFVNPKRPFWPWKGLEIISRRTQRRLRRIKESWGLQDLVNDFGNLQLGPPMS
(italic: nucleic acid editing domain)
Rat APOBEC-3:
(SEQ ID NO: 355)
MGPFCLGCSHRKCYSPIRNLISQETFKFHFKNLRYAIDRKDTFLCYEVTRKDCDSPVSLHHGVFKNKDNIHAEI
CFLYWFHDKVLKVLSPREEFKITWYMSWSPCFECAEQVLRFLATHHNLSLDIFSSRLYNIRDPENQQNLCRLVQ
EGAQVAAMDLYEFKKCWKKFVDNGGRRFRPWKKLLTNFRYQDSKLQEILRPCYIPVPSSSSSTLSNICLTKGLP
ETRFCVERRRVHLLSEEEFYSQFYNQRVKHLCYYHGVKPYLCYQLEQFNGQAPLKGCLLSEKGKQHAEILFLDK
IRSMELSQVIITCYLTWSPCPNCAWQLAAFKRDRPDLILHIYTSRLYFHWKRPFQKGLCSLWQSGILVDVMDLP
QFTDCWTNFVNPKRPFWPWKGLEIISRRTQRRLHRIKESWGLQDLVNDFGNLQLGPPMS
(italic: nucleic acid editing domain)
Rhesus macaque APOBEC-3G:
(SEQ ID NO: 356)
MVEPMDPRTFVSNFNNRPILSGLNTVWLCCEVKTKDPSGPPLDAKIFQGKVYSKAKYHPEMRFLRWFHKWRQLH
HDQEYKVTWYVSWSPCTRCANSVATFLAKDPKVTLTIFVARLYYFWKPDYQQALRILCQKRGGPHATMKIMNYN
EFQDCWNKFVDGRGKPFKPRNNLPKHYTLLQATLGELLRHLMDPGTFTSNFNNKPWVSGQHETYLCYKVERLHN
DTWVPLNQHRGFLRNQAPNIHGFPKGRHAELCFLDLIPFWKLDGQQYRVTCFTSWSPCFSCAQEMAKFISNNEH
VSLCIFAARIYDDQGRYQEGLRALHRDGAKIAMMNYSEFEYCWDTFVDRQGRPFQPWDGLDEHSQALSGRLRAI
(italic: nucleic acid editing domain; underline: cytoplasmic localization signal)
Chimpanzee APOBEC-3G:
(SEQ ID NO: 357)
MKPHFRNPVERMYQDTFSDNFYNRPILSHRNTVWLCYEVKTKGPSRPPLDAKIFRGQVYSKLKYHPEMRFFHWF
SKWRKLHRDQEYEVTWYISWSPCTKCTRDVATFLAEDPKVTLTIFVARLYYFWDPDYQEALRSLCQKRDGPRAT
MKIMNYDEFQHCWSKFVYSQRELFEPWNNLPKYYILLHIMLGEILRHSMDPPTFTSNFNNELWVRGRHETYLCY
EVERLHNDTWVLLNQRRGFLCNQAPHKHGFLEGRHAELCFLDVIPFWKLDLHQDYRVTCFTSWSPCFSCAQEMA
KFISNNKHVSLCIFAARIYDDQGRCQEGLRTLAKAGAKISIMTYSEFKHCWDTFVDHQGCPFQPWDGLEEHSQA
LSGRLRAILQNQGN
(italic: nucleic acid editing domain; underline: cytoplasmic localization signal)
Green monkey APOBEC-3G:
(SEQ ID NO: 358)
MNPQIRNMVEQMEPDIFVYYFNNRPILSGRNTVWLCYEVKTKDPSGPPLDANIFQGKLYPEAKDHPEMKFLHWF
RKWRQLHRDQEYEVTWYVSWSPCTRCANSVATFLAEDPKVTLTIFVARLYYFWKPDYQQALRILCQERGGPHAT
MKIMNYNEFQHCWNEFVDGQGKPFKPRKNLPKHYTLLHATLGELLRHVMDPGTFTSNFNNKPWVSGQRETYLCY
KVERSHNDTWVLLNQHRGFLRNQAPDRHGFPKGRHAELCFLDLIPFWKLDDQQYRVTCFTSWSPCFSCAQKMAK
FISNNKHVSLCIFAARIYDDQGRCQEGLRTLHRDGAKIAVMNYSEFEYCWDTFVDRQGRPFQPWDGLDEHSQAL
SGRLRAI
(italic: nucleic acid editing domain; underline: cytoplasmic localization signal)
Human APOBEC-3G:
(SEQ ID NO: 359)
MKPHFRNTVERMYRDTFSYNFYNRPILSRRNTVWLCYEVKTKGPSRPPLDAKIFRGQVYSELKYHPEMRFFHWF
SKWRKLHRDQEYEVTWYISWSPCTKCTRDMATFLAEDPKVTLTIFVARLYYFWDPDYQEALRSLCQKRDGPRAT
MKIMNYDEFQHCWSKFVYSQRELFEPWNNLPKYYILLHIMLGEILRHSMDPPTFTFNFNNEPWVRGRHETYLCY
EVERMHNDTWVLLNQRRGFLCNQAPHKHGFLEGRHAELCFLDVIPFWKLDLDQDYRVTCFTSWSPCFSCAQEMA
KFISKNKHVSLCIFTARIYDDQGRCQEGLRTLAEAGAKISIMTYSEFKHCWDTFVDHQGCPFQPWDGLDEHSQD
LSGRLRAILQNQEN
(italic: nucleic acid editing domain; underline: cytoplasmic localization signal)
Human APOBEC-3F:
(SEQ ID NO: 360)
MKPHFRNTVERMYRDTFSYNFYNRPILSRRNTVWLCYEVKTKGPSRPRLDAKIFRGQVYSQPEHHAEMCFLSWF
CGNQLPAYKCFQITWFVSWTPCPDCVAKLAEFLAEHPNVTLTISAARLYYYWERDYRRALCRLSQAGARVKIMD
DEEFAYCWENFVYSEGQPFMPWYKFDDNYAFLHRTLKEILRNPMEAMYPHIFYFHFKNLRKAYGRNESWLCFTM
EVVKHHSPVSWKRGVFRNQVDPETHCHAERCFLSWFCDDILSPNTNYEVTWYTSWSPCPECAGEVAEFLARHSN
VNLTIFTARLYYFWDTDYQEGLRSLSQEGASVEIMGYKDFKYCWENFVYNDDEPFKPWKGLKYNFLFLDSKLQE
ILE
(italic: nucleic acid editing domain)
Human APOBEC-3B:
(SEQ ID NO: 361)
MNPQIRNPMERMYRDTFYDNFENEPILYGRSYTWLCYEVKIKRGRSNLLWDTGVFRGQVYFKPQYHAEMCFLSW
FCGNQLPAYKCFQITWFVSWTPCPDCVAKLAEFLSEHPNVTLTISAARLYYYWERDYRRALCRLSQAGARVTIM
DYEEFAYCWENFVYNEGQQFMPWYKFDENYAFLHRTLKEILRYLMDPDTFTFNFNNDPLVLRRRQTYLCYEVER
LDNGTWVLMDQHMGFLCNEAKNLLCGFYGRHAELRFLDLVPSLQLDPAQIYRVTWFISWSPCFSWGCAGEVRAF
LQENTHVRLRIFAARIYDYDPLYKEALQMLRDAGAQVSIMTYDEFEYCWDTFVYRQGCPFQPWDGLEEHSQALS
GRLRAILQNQGN
(italic: nucleic acid editing domain)
Rat APOBEC-3B:
(SEQ ID NO: 378)
MQPQGLGPNAGMGPVCLGCSHRRPYSPIRNPLKKLYQQTFYFHFKNVRYAWGRKNNFLCYEVNGMDCALPVPLR
QGVFRKQGHIHAELCFIYWFHDKVLRVLSPMEEFKVTWYMSWSPCSKCAEQVARFLAAHRNLSLAIFSSRLYYY
LRNPNYQQKLCRLIQEGVHVAAMDLPEFKKCWNKFVDNDGQPFRPWMRLRINFSFYDCKLQEIFSRMNLLREDV
FYLQFNNSHRVKPVQNRYYRRKSYLCYQLERANGQEPLKGYLLYKKGEQHVEILFLEKMRSMELSQVRITCYLT
WSPCPNCARQLAAFKKDHPDLILRIYTSRLYFYWRKKFQKGLCTLWRSGIHVDVMDLPQFADCWTNFVNPQRPF
RPWNELEKNSWRIQRRLRRIKESWGL
Bovine APOBEC-3B:
(SEQ ID NO: 379)
DGWEVAFRSGTVLKAGVLGVSMTEGWAGSGHPGQGACVWTPGTRNTMNLLREVLFKQQFGNQPRVPAPYYRRKT
YLCYQLKQRNDLTLDRGCFRNKKQRHAEIRFIDKINSLDLNPSQSYKIICYITWSPCPNCANELVNFITRNNHL
KLEIFASRLYFHWIKSFKMGLQDLQNAGISVAVMTHTEFEDCWEQFVDNQSRPFQPWDKLEQYSASIRRRLQRI
LTAPI
Chimpanzee APOBEC-3B:
(SEQ ID NO: 380)
MNPQIRNPMEWMYQRTFYYNFENEPILYGRSYTWLCYEVKIRRGHSNLLWDTGVFRGQMYSQPEHHAEMCFLSW
FCGNQLSAYKCFQITWFVSWTPCPDCVAKLAKFLAEHPNVTLTISAARLYYYWERDYRRALCRLSQAGARVKIM
DDEEFAYCWENFVYNEGQPFMPWYKFDDNYAFLHRTLKEIIRHLMDPDTFTFNFNNDPLVLRRHQTYLCYEVER
LDNGTWVLMDQHMGFLCNEAKNLLCGFYGRHAELRFLDLVPSLQLDPAQIYRVTWFISWSPCFSWGCAGQVRAF
LQENTHVRLRIFAARIYDYDPLYKEALQMLRDAGAQVSIMTYDEFEYCWDTFVYRQGCPFQPWDGLEEHSQALS
GRLRAILQVRASSLCMVPHRPPPPPQSPGPCLPLCSEPPLGSLLPTGRPAPSLPFLLTASFSFPPPASLPPLPS
LSLSPGHLPVPSFHSLTSCSIQPPCSSRIRETEGWASVSKEGRDLG
Human APOBEC-3C:
(SEQ ID NO: 362)
MNPQIRNPMKAMYPGTFYFQFKNLWEANDRNETWLCFTVEGIKRRSVVSWKTGVFRNQVDSETHCHAERCFLSW
FCDDILSPNTKYQVTWYTSWSPCPDCAGEVAEFLARHSNVNLTIFTARLYYFQYPCYQEGLRSLSQEGVAVEIM
DYEDFKYCWENFVYNDNEPFKPWKGLKTNFRLLKRRLRESLQ
(italic: nucleic acid editing domain)
Gorilla APOBEC3C:
(SEQ ID NO: 375)
MNPQIRNPMKAMYPGTFYFQFKNLWEANDRNETWLCFTVEGIKRRSVVSWKTGVFRNQVDSETHCHAERCFLSW
FCDDILSPNTNYQVTWYTSWSPCPECAGEVAEFLARHSNVNLTIFTARLYYFQDTDYQEGLRSLSQEGVAVKIM
DYKDFKYCWENEVYNDDEPFKPWKGLKYNERFLKRRLQEILE
(italic: nucleic acid editing domain)
Human APOBEC-3A:
(SEQ ID NO: 363)
MEASPASGPRHLMDPHIFTSNFNNGIGRHKTYLCYEVERLDNGTSVKMDQHRGFLHNQAKNLLCGFYGRHAELR
FLDLVPSLQLDPAQIYRVTWFISWSPCFSWGCAGEVRAFLQENTHVRLRIFAARIYDYDPLYKEALQMLRDAGA
QVSIMTYDEFKHCWDTFVDHQGCPFQPWDGLDEHSQALSGRLRAILQNQGN
(italic: nucleic acid editing domain)
Rhesus macaque APOBEC-3A:
(SEQ ID NO: 376)
MDGSPASRPRHLMDPNTFTFNENNDLSVRGRHQTYLCYEVERLDNGTWVPMDERRGFLCNKAKNVPCGDYGCHV
ELRFLCEVPSWQLDPAQTYRVTWFISWSPCFRRGCAGQVRVFLQENKHVRLRIFAARIYDYDPLYQEALRTLRD
AGAQVSIMTYEEFKHCWDTFVDRQGRPFQPWDGLDEHSQALSGRLRAILQNQGN
(italic: nucleic acid editing domain)
Bovine APOBEC-3A:
(SEQ ID NO: 377)
MDEYTFTENFNNQGWPSKTYLCYEMERLDGDATIPLDEYKGFVRNKGLDQPEKPCHAELYFLGKIHSWNLDRNQ
HYRLTCFISWSPCYDCAQKLTTFLKENHHISLHILASRIYTHNRFGCHQSGLCELQAAGARITIMTFEDFKHCW
ETFVDHKGKPFQPWEGLNVKSQALCTELQAILKTQQN
(italic: nucleic acid editing domain)
Human APOBEC-3H:
(SEQ ID NO: 364)
MALLTAETERLQFNNKRRLRRPYYPRKALLCYQLTPQNGSTPIRGYFENKKKCHAEICFINEIKSMGLDETQCY
QVTCYLTWSPCSSCAWELVDFIKAHDHLNLGIFASRLYYHWCKPQQKGLRLLCGSQVPVEVMGFPKFADCWENF
VDHEKPLSFNPYKMLEELDKNSRAIKRRLERIKIPGVRAQGRYMDILCDAEV
(italic: nucleic acid editing domain)
Rhesus macaque APOBEC-3H:
(SEQ ID NO: 381)
MALLTAKTFSLQFNNKRRVNKPYYPRKALLCYQLTPQNGSTPTRGHLKNKKKDHAEIRFINKIKSMGLDETQCY
QVTCYLTWSPCPSCAGELVDFIKAHRHLNLRIFASRLYYHWRPNYQEGLLLLCGSQVPVEVMGLPEFTDCWENF
VDHKEPPSFNPSEKLEELDKNSQAIKRRLERIKSRSVDVLENGLRSLQLGPVTPSSSIRNSR
Human APOBEC-3D:
(SEQ ID NO: 365)
MNPQIRNPMERMYRDTFYDNFENEPILYGRSYTWLCYEVKIKRGRSNLLWDTGVFRGPVLPKRQSNHRQEVYFR
FENHAEMCFLSWFCGNRLPANRREQITWFVSWNPCLPCVVKVTKFLAEHPNVTLTISAARLYYYRDRDWRWVLL
RLHKAGARVKIMDYEDFAYCWENFVCNEGQPFMPWYKEDDNYASLHRTLKEILRNPMEAMYPHIFYFHFKNLLK
ACGRNESWLCFTMEVTKHHSAVERKRGVERNQVDPETHCHAERCFLSWFCDDILSPNTNYEVTWYTSWSPCPEC
AGEVAEFLARHSNVNLTIFTARLCYFWDTDYQEGLCSLSQEGASVKIMGYKDEVSCWKNEVYSDDEPFKPWKGL
QTNERLLKRRLREILQ
(italic: nucleic acid editing domain)
Human APOBEC-1:
(SEQ ID NO: 366)
MTSEKGPSTGDPTLRRRIEPWEEDVEYDPRELRKEACLLYEIKWGMSRKIWRSSGKNTINHVEVNFIKKFTSER
DFHPSMSCSITWFLSWSPCWECSQAIREELSRHPGVTLVIYVARLFWHMDQQNRQGLRDLVNSGVTIQIMRASE
YYHCWRNFVNYPPGDEAHWPQYPPLWMMLYALELHCIILSLPPCLKISRRWQNHLTFFRLHLQNCHYQTIPPHI
LLATGLIHPSVAWR
Mouse APOBEC-1:
(SEQ ID NO: 367)
MSSETGPVAVDPTLRRRIEPHEFEVFFDPRELRKETCLLYEINWGGRHSVWRHTSQNTSNHVEVNFLEKFTTER
YFRPNTRCSITWFLSWSPCGECSRAITEFLSRHPYVTLFIYIARLYHHTDQRNRQGLRDLISSGVTIQIMTEQE
YCYCWRNFVNYPPSNEAYWPRYPHLWVKLYVLELYCIILGLPPCLKILRRKQPQLTFFTITLQTCHYQRIPPHL
LWATGLK
Rat APOBEC-1:
(SEQ ID NO: 368)
MSSETGPVAVDPTLRRRIEPHEFEVFFDPRELRKETCLLYEINWGGRHSIWRHTSQNTNKHVEVNFIEKFTTER
YFCPNTRCSITWFLSWSPCGECSRAITEFLSRYPHVTLFIYIARLYHHADPRNRQGLRDLISSGVTIQIMTEQE
SGYCWRNFVNYSPSNEAHWPRYPHLWVRLYVLELYCIILGLPPCLNILRRKQPQLTFFTIALQSCHYQRLPPHI
LWATGLK
Human APOBEC-2:
(SEQ ID NO: 382)
MAQKEEAAVATEAASQNGEDLENLDDPEKLKELIELPPFEIVTGERLPANFFKFQFRNVE
YSSGRNKTFLCYVVEAQGKGGQVQASRGYLEDEHAAAHAEEAFFNTILPAFDPALRYNVIWYVSSSPCAACADR
IIKILSKTKNLRLLILVGRLFMWEEPEIQAALKKLKEAGCKLRIMKPQDFEYVWQNFVEQEEGESKAFQPWEDI
QENFLYYEEKLADILK
Mouse APOBEC-2:
(SEQ ID NO: 383)
MAQKEEAAEAAAPASQNGDDLENLEDPEKLKELIDLPPFEIVTGVRLPVNFFKFQFRNVEYSSGRNKTFLCYVV
EVQSKGGQAQATQGYLEDEHAGAHAEEAFFNTILPAFDPALKYNVTWYVSSSPCAACADRILKTLSKTKNLRLL
ILVSRLFMWEEPEVQAALKKLKEAGCKLRIMKPQDFEYIWQNFVEQEEGESKAFEPWEDIQENFLYYEEKLADI
LK
Rat APOBEC-2:
(SEQ ID NO: 384)
MAQKEEAAEAAAPASQNGDDLENLEDPEKLKELIDLPPFEIVTGVRLPVNFFKFQFRNVEYSSGRNKTFLCYVV
EAQSKGGQVQATQGYLEDEHAGAHAEEAFFNTILPAFDPALKYNVTWYVSSSPCAACADRILKTLSKTKNLRLL
ILVSRLFMWEEPEVQAALKKLKEAGCKLRIMKPQDFEYLWQNFVEQEEGESKAFEPWEDIQENFLYYEEKLADI
LK
Bovine APOBEC-2:
(SEQ ID NO: 385)
MAQKEEAAAAAEPASQNGEEVENLEDPEKLKELIELPPFEIVTGERLPAHYFKFQFRNVE
YSSGRNKTFLCYVVEAQSKGGQVQASRGYLEDEHATNHAEEAFFNSIMPTFDPALRYMVIWYVSSSPCAACADR
IVKILNKTKNLRLLILVGRLFMWEEPEIQAALRKLKEAGCRLRIMKPQDFEYIWQNFVEQEEGESKAFEPWEDI
QENFLYYEEKLADILK
Petromyzon marinus CDA1 (pmCDA1):
(SEQ ID NO: 386)
MTDAEYVRIHEKLDIYTFKKQFFNNKKSVSHRCYVLFELKRRGERRACFWGYAVNKPQSGTERGIHAEIFSIRK
VEEYLRDNPGQFTINWYSSWSPCADCAEKILEWYNQELRGNGHTLKIWACKLYYEKNARNQIGLWNLRDNGVGL
NVMVSEHYQCCRKIFIQSSHNQLNENRWLEKTLKRAEKRRSELSIMIQVKILHTTKSPAV
Human APOBEC3G D316R_D317R:
(SEQ ID NO: 387)
MKPHERNTVERMYRDTFSYNFYNRPILSRRNTVWLCYEVKTKGPSRPPLDAKIFRGQVYSELKYHPEMRFFHWF
SKWRKLHRDQEYEVTWYISWSPCTKCTRDMATFLAEDPKVTLTIFVARLYYFWDPDYQEALRSLCQKRDGPRAT
MKIMNYDEFQHCWSKFVYSQRELFEPWNNLPKYYILLHIMLGEILRHSMDPPTFTFNENNEPWVRGRHETYLCY
EVERMHNDTWVLLNQRRGELCNQAPHKHGELEGRHAELCFLDVIPFWKLDLDQDYRVTCFTSWSPCFSCAQEMA
KFISKNKHVSLCIFTARIYRRQGRCQEGLRTLAEAGAKISIMTYSEFKHCWDTFVDHQGCPFQPWDGLDEHSQD
LSGRLRAILQNQEN
Human APOBEC3G chain A:
(SEQ ID NO: 388)
MDPPTFTFNFNNEPWVRGRHETYLCYEVERMHNDTWVLLNQRRGFLCNQAPHKHGFLEGRHAELCFLDVIPFWK
LDLDQDYRVTCFTSWSPCFSCAQEMAKFISKNKHVSLCIFTARIYDDQGRCQEGLRTLAEAGAKISIMTYSEFK
HCWDTFVDHQGCPFQPWDGLDEHSQDLSGRLRAILQ
Human APOBEC3G chain A D120R_D121R:
(SEQ ID NO: 389)
MDPPTFTFNFNNEPWVRGRHETYLCYEVERMHNDTWVLLNQRRGFLCNQAPHKHGFLEGRHAELCFLDVIPFW
KLDLDQDYRVTCFTSWSPCFSCAQEMAKFISKNKHVSLCIFTARIYRRQGRCQEGLRTLAEAGAKISIMTYSE
FKHCWDTFVDHQGCPFQPWDGLDEHSQDLSGRLRAILQ

[0335] In some embodiments, the deaminase domain is an adenosine deaminase domain. In some embodiments, the adenosine deaminase catalyzes the hydrolytic deamination of adenosine (A) or deoxyadenosine (dA) to inosine (I) or deoxyinosine (dI), respectively. In some embodiments, the adenosine deaminase catalyzes the hydrolytic deamination of adenine or adenosine in deoxyribonucleic acid (DNA). For example, the adenosine may be converted to an inosine residue, which typically base pairs with a cytosine residue. Without wishing to be bound by any particular theory, fusion proteins comprising an adenosine deaminase are useful inter alia for targeted editing, referred to herein as “base editing,” of nucleic acid sequences in vitro and in vivo. The adenosine deaminase may be derived from any suitable organism (e.g., E. coli). In some embodiments, the adenine deaminase is a naturally-occurring adenosine deaminase that includes one or more mutations (i.e., a recombinant adenosine deaminase) corresponding to any of the mutations provided herein (e.g., mutations in ecTadA). One of ordinary skill in the art will be able to identify the corresponding residue in any homologous protein and in the respective encoding nucleic acid by methods well known in the art, e.g., by sequence alignment and determination of homologous residues. Accordingly, one of ordinary skill in the art would be able to generate mutations in any naturally-occurring adenosine deaminase (e.g., having homology to ecTadA) that corresponds to any of the mutations described herein, e.g., any of the mutations identified in ecTadA. In some embodiments, the adenosine deaminase is from a prokaryote. In some embodiments, the adenosine deaminase is from a bacterium. In some embodiments, the adenosine deaminase is from Escherichia coli, Staphylococcus aureus, Salmonella typhi, Shewanella putrefaciens, Haemophilus influenzae, Caulobacter crescentus, or Bacillus subtilis. In some embodiments, the adenosine deaminase is from E. coli.

[0336] In some embodiments, the adenosine deaminase comprises the amino acid sequence of any one of SEQ ID NOs: 400-458. In some embodiments, the adenosine deaminase consists of the amino acid sequence of any one of SEQ ID NOs: 400-458. In some embodiments, the adenosine deaminase comprises an amino acid sequence that is at least 60%, at least 65%, at least 70%, at least 75%, at least 80%, at least 85%, at least 90%, at least 95%, at least 96%, at least 97%, at least 98%, at least 99%, or at least 99.5% identical to any one of the amino acid sequences set forth in any one of SEQ ID NOs: 400-458. Additional adenosine deaminase domains are provided and described in Gaudelli N M, et al. (2017) Programmable base editing of A·T to G·C in genomic DNA without DNA cleavage, Nature, 551(23); 464-471; the entire contents of which is incorporated herein by reference. It should be appreciated that adenosine deaminases provided herein may include one or more mutations (e.g., any of the mutations provided herein), or may not include any mutations (i.e., a wild-type adensosine demainase). The disclosure provides any deaminase domains with a certain percent identity plus any of the mutations or combinations thereof described herein. In some embodiments, the adenosine deaminase comprises an amino acid sequence that has 1, 2, 3, 4, 5, 6, 7, 8, 9, 10, 11, 12, 13, 14, 15, 16, 17, 18, 19, 20, 21, 22, 21, 24, 25, 26, 27, 28, 29, 30, 31, 32, 33, 34, 35, 36, 37, 38, 39, 40, 41, 42, 43, 44, 45, 46, 47, 48, 49, 50, or more mutations compared to any one of the amino acid sequences set forth in SEQ ID NOs: 400-458 or any of the adenosine deaminases provided herein. In some embodiments, the adenosine deaminase comprises an amino acid sequence that has at least 5, at least 10, at least 15, at least 20, at least 25, at least 30, at least 35, at least 40, at least 45, at least 50, at least 60, at least 70, at least 80, at least 90, at least 100, at least 110, at least 120, at least 130, at least 140, at least 150, at least 160, or at least 170 identical contiguous amino acid residues as compared to any one of the amino acid sequences set forth in SEQ ID NOs: 400-458, or any of the adenosine deaminases provided herein.

[0337] It should be appreciated that the adenosine deaminase (e.g., a first or second adenosine deaminase) may comprise one or more of the mutations provided in any of the adenosine deaminases (e.g., ecTadA adenosine deaminases) shown in Example 2. In some embodiments, the adenosine deaminase comprises the combination of mutations of any of the adenosine deaminases (e.g., ecTadA adenosine deaminases) shown in Example 2. For example, the adenosine deaminase may comprise the mutations W23R, H36L, P48A, R51L, L84F, A106V, D108N, H123Y, S146C, D147Y, R152P, E155V, I156F, and K157N (relative to SEQ ID NO: 400), which is also referred to as ABE7.10. In some embodiments, the adenosine deaminase may comprise the mutations H36L, R51L, L84F, A106V, D108N, H123Y, S146C, D147Y, E155V, I156F, and K157N (relative to SEQ ID NO: 400). In some embodiments, the adenosine deaminase comprises any of the following combination of mutations relative to SEQ ID NO: 400, where each mutation of a combination is separated by a “_” and each combination of mutations is between parentheses: (A106V_D108N), (R107C_D108N), (H8Y_D108N_S127S_D147Y_Q154H), (H8Y_R24 W_D108N_N127S_D147Y_E155V), (D108N_D147Y_E155V), (H8Y_D108N_S127S), (H8Y_D108N_N127S_D147Y_Q154H), (A106V_D108N_D147Y_E155V), (D108Q_D147Y_E155V), (D108M_D147Y_E155V), (D108L_D147Y_E155V), (D108K_D147Y_E155V), (D108I_D147Y_E155V), (D108F_D147Y_E155V), (A106V_D108N_D147Y), (A106V_D108M_D147Y_E155V), (E59A_A106V_D108N_D147Y_E155V), (E59A cat dead_A106V_D108N_D147Y_E155V), (L84F_A106V_D108N_H123Y_D147Y_E155V_I156Y), (L84F_A106V_D108N_H123Y_D147Y_E155V_I156F), (D103A_D014N), (G22P_D103A_D104N), (G22P_D103A_D104N_S138A), (D103A_D104N_S138A), (R26G_L84F_A106V_R107H_D108N_H123Y_A142N_A143D_D147Y_E155V_I156F), (E25G_R26G_L84F_A106V_R107H_D108N_H123Y_A142N_A143D_D147Y_E155V_I156F), (E25D_R26G_L84F_A106V_R107K_D108N_H123Y_A142N_A143G_D147Y_E155V_I156F), (R26Q_L84F_A106V_D108N_H123Y_A142N_D147Y_E155V_I156F), (E25M_R26G_L84F_A106V_R107P_D108N_H123Y_A142N_A143D_D147Y_E155V_I156F), (R26C_L84F_A106V_R107H_D108N_H123Y_A142N_D147Y_E155V_I156F), (L84F_A106V_D108N_H123Y_A142N_A143L_D147Y_E155V_I156F), (R26G_L84F_A106V_D108N_H123Y_A142N_D147Y_E155V_I156F), (E25A_R26G_L84F_A106V_R107N_D108N_H123Y_A142N_A143E_D147Y_E155V_I156F), (R26G_L84F_A106V_R107H_D108N_H123Y_A142N_A143D_D147Y_E155V_I156F), (A106V_D108N_A142N_D147Y_E155V), (R26G_A106V_D108N_A142N_D147Y_E155V), (E25D_R26G_A106V_R107K_D108N_A142N_A143G_D147Y_E155V), (R26G_A106V_D108N_R107H_A142N_A143D_D147Y_E155V), (E25D_R26G_A106V_D108N_A142N_D147Y_E155V), (A106V_R107K_D108N_A142N_D147Y_E155V), (A106V_D108N_A142N_A143G_D147Y_E155V), (A106V_D108N_A142N_A143L_D147Y_E155V), (H36L_R51L_L84F_A106V_D108N_H123Y_S146C_D147Y_E155V_I156F_K157N), (H36L_P48S_R51L_L84F_A106V_D108N_H123Y_S146C_D147Y_E155V_I156F_K157N), (H36L_P48S_R51L_L84F_A106V_D108N_H123Y_A142N_S146C_D147Y_E155V_I156F_K157N), (W23L_H36L_P48A_R51L_L84F_A106V_D108N_H123Y_A142N_S146C_D147Y_E155V_I156F_K157N), (W23L_H36L_P48A_R51L_L84F_A106V_D108N_H123Y_A142N_S146C_D147Y_R152P_E155V_I156F_K157N), (N37T_P48T_M70L_L84F_A106V_D108N_H123Y_D147Y_I49V_E155V_I156F), (N37S_L84F_A106V_D108N_H123Y_D147Y_E155V_I156F_K161T), (H36L_L84F_A106V_D108N_H123Y_D147Y_Q154H_E155V_I156F), (N72S_L84F_A106V_D108N_H123Y_S146R_D147Y_E155V_I156F), (H36L_P48L_L84F_A106V_D108N_H123Y_E134G_D147Y_E155V_I156F), (H36L_L84F_A106V_D108N_H123Y_D147Y_E155V_I156F_K157N), (H36L_L84F_A106V_D108N_H123Y_S146C_D147Y_E155V_I156F), (L84F_A106V_D108N_H123Y_S146R_D147Y_E155V_I156F_K161T), (N37S_R51H_D77G_L84F_A106V_D108N_H123Y_D147Y_E155V_I156F), (R51L_L84F_A106V_D108N_H123Y_D147Y_E155V_I156F_K157N), (D24G_Q71R_L84F_H96L_A106V_D108N_H123Y_D147Y_E155V_I156F_K160E), (H36L_G67V_L84F_A106V_D108N_H123Y_S146T_D147Y_E155V_I156F), (Q71L_L84F_A106V_D108N_H123Y_L137M_A143E_D147Y_E155V_I156F), (E25G_L84F_A106V_D108N_H123Y_D147Y_E155V_I156F_Q159L), (L84F_A91T_F104I_A106V_D108N_H123Y_D147Y_E155V_I156F), (N72D_L84F_A106V_D108N_H123Y_G125A_D147Y_E155V_I156F), (P48S_L84F_S97C_A106V_D108N_H123Y_D147Y_E155V_I156F), (W23G_L84F_A106V_D108N_H123Y_D147Y_E155V_I156F), (D24G_P48L_Q71R_L84F_A106V_D108N_H123Y_D147Y_E155V_I156F_Q159L), (L84F_A106V_D108N_H123Y_A142N_D147Y_E155V_I156F), (H36L_R51L_L84F_A106V_D108N_H123Y_A142N_S146C_D147Y_E155V_I156F_K157N), (N37S_L84F_A106V_D108N_H123Y_A142N_D147Y_E155V_I156F_K161T), (L84F_A106V_D108N_D147Y_E155V_I156F), (R51L_L84F_A106V_D108N_H123Y_S146C_D147Y_E155V_I156F_K157N_K161T), (L84F_A106V_D108N_H123Y_S146C_D147Y_E155V_I156F_K161T), (L84F_A106V_D108N_H123Y_S146C_D147Y_E155V_I156F_K157N_K160E_K161T), (L84F_A106V_D108N_H123Y_S146C_D147Y_E155V_I156F_K157N_K160E), (R74Q L84F_A106V_D108N_H123Y_D147Y_E155V_I156F), (R74A_L84F_A106V_D108N_H123Y_D147Y_E155V_I156F), (L84F_A106V_D108N_H123Y_D147Y_E155V_I156F), (R74Q_L84F_A106V_D108N_H123Y_D147Y_E155V_I156F), (L84F_R98Q_A106V_D108N_H123Y_D147Y_E155V_I156F), (L84F_A106V_D108N_H123Y_R129Q_D147Y_E155V_I156F), (P48S_L84F_A106V_D108N_H123Y_A142N_D147Y_E155V_I156F), (P48S_A142N), (P48T_I49V_L84F_A106V_D108N_H123Y_A142N_D147Y_E155V_I156F_L157N), (P48T_I49V_A142N), (H36L_P48S_R51L_L84F_A106V_D108N_H123Y_S146C_D147Y_E155V_I156F_K157N), (H36L_P48S_R51L_L84F_A106V_D108N_H123Y_S146C_A142N_D147Y_E155V_I156F _K157N), (H36L_P48T_I49V_R51L_L84F_A106V_D108N_H123Y_S146C_D147Y_E155V_I156F _K157N), (H36L_P48T_I49V_R51L_L84F_A106V_D108N_H123Y_A142N_S146C_D147Y_E155V_I156F_K157N), (H36L_P48A_R51L_L84F_A106V_D108N_H123Y_S146C_D147Y_E155V_I156F_K157N), (H36L_P48A_R51L_L84F_A106V_D108N_H123Y_A142N_S146C_D147Y_E155V_I156F _K157N), (H36L_P48A_R51L_L84F_A106V_D108N_H123Y_S146C_A142N_D147Y_E155V_I156F _K157N), (W23L_H36L_P48A_R51L_L84F_A106V_D108N_H123Y_S146C_D147Y_E155V_I156F _K157N), (W23R_H36L_P48A_R51L_L84F_A106V_D108N_H123Y_S146C_D147Y_E155V_I156F _K157N), (W23L_H36L_P48A_R51L_L84F_A106V_D108N_H123Y_S146R_D147Y_E155V_I156F _K161T), (H36L_P48A_R51L_L84F_A106V_D108N_H123Y_S146C_D147Y_R152H_E155V_I156F _K157N), (H36L_P48A_R51L_L84F_A106V_D108N_H123Y_S146C_D147Y_R152P_E155V_I156F _K157N), (W23L_H36L_P48A_R51L_L84F_A106V_D108N_H123Y_S146C_D147Y_R152P_E155V_I156F_K157N), (W23L_H36L_P48A_R51L_L84F_A106V_D108N_H123Y_A142A_S146C_D147Y_E155V_I156F_K157N), (W23L_H36L_P48A_R51L_L84F_A106V_D108N_H123Y_A142A_S146C_D147Y_R152P_E155V_I156F_K157N), (W23L_H36L_P48A_R51L_L84F_A106V_D108N_H123Y_S146R_D147Y_E155V_I156F _K161T), (W23R_H36L_P48A_R51L_L84F_A106V_D108N_H123Y_S146C_D147Y_R152P_E155V_I156F_K157N), (H36L_P48A_R51L_L84F_A106V_D108N_H123Y_A142N_S146C_D147Y_R152P_E155V_I156F_K157N).

[0338] In some embodiments, fusion proteins as provided herein comprise the full-length amino acid of a nucleic acid editing enzyme, e.g., one of the sequences provided above. In other embodiments, however, fusion proteins as provided herein do not comprise a full-length sequence of a nucleic acid editing enzyme, but only a fragment thereof. For example, in some embodiments, a fusion protein provided herein comprises a napDNAbp and a fragment of a nucleic acid editing enzyme, e.g., wherein the fragment comprises a nucleic acid editing domain. Exemplary amino acid sequences of nucleic acid editing domains are shown in the sequences above, and additional suitable sequences of such domains will be apparent to those of ordinary skill in the art based on this disclosure and knowledge in the field. Additional suitable nucleic-acid editing enzyme sequences, e.g., deaminase enzyme and domain sequences, e.g., that can be fused to a napDNAbp (e.g., a nuclease-inactive Cas9 domain), will be apparent to those of ordinary skill in the art based on this disclosure. In some embodiments, such additional enzyme sequences include deaminase enzyme or deaminase domain sequences that are at least 70%, at least 75%, at least 80%, at least 85%, at least 90%, at least 95%, at least 96%, at least 97%, at least 98%, or at least 99% similar to the sequences provided herein. Additional suitable napDNAbps (e.g., Cas9 domains), variants, and sequences will also be apparent to those of ordinary skill in the art. Examples of such additional suitable Cas9 domains include, but are not limited to, D10A, D10A/D839A/H840A, and D10A/D839A/H840A/N863A mutant domains (see, e.g., Prashant et al., CAS9 transcriptional activators for target specificity screening and paired nickases for cooperative genome engineering. Nature Biotechnology. 2013; 31(9): 833-838; the entire contents of which are incorporated herein by reference). In some embodiments, the Cas9 comprises a histidine residue at position 840 of the amino acid sequence provided in SEQ ID NO: 10, or a corresponding mutation in any of the amino acid sequences provided in SEQ ID NOs: 11-260. The presence of the catalytic residue H840 restores the activity of the Cas9 to cleave the non-edited strand containing a G opposite the targeted C. Restoration of H840 does not result in the cleavage of the target strand containing the C.

### Fusion Proteins

[0339] Any of the nucleic acid programmable DNA binding proteins (e.g, Cas9 domains (e.g., a nuclease active Cas9 domain, a nuclease-inactive dCas9 domain, or a Cas9 nickase domain) disclosed herein may be fused to a second protein, thus providing fusion proteins that comprise a napDNAbp as provided herein and a second protein, or a “fusion partner.” In some embodiments, the second protein is a nucleic acid editing domain. Some aspects of the disclosure provide fusion proteins comprising a nucleic acid programmable DNA binding protein (napDNAbp) and a nucleic acid editing domain.

[0340] In some embodiments, the second protein is fused to the N-terminus of the napDNAbp. However, in other embodiments, the second protein is fused to the C-terminus of the napDNAbp. In some embodiments, the second protein that is fused to the napDNAbp is a nucleic acid editing domain. In some embodiments, the napDNAbp and the nucleic acid editing domain are fused via a linker, while in other embodiments the napDNAbp and the nucleic acid editing domain are fused directly to one another. In some embodiments, the linker comprises the amino acid sequence of any one of SEQ ID NOs: 300-318. In some embodiments, a linker comprises the amino acid sequence SGSETPGTSESATPES (SEQ ID NO: 306), which may also be referred to as an XTEN linker in the Examples and Figures. In some embodiments, a linker comprises the amino acid sequence SGGS (SEQ ID NO: 309). In some embodiments, a linker comprises the amino acid sequence (SGGS)₂—SGSETPGTSESATPES-(SGGS)₂ (SEQ ID NO: 308), which may also be referred to as (SGGS)₂—XTEN-(SGGS)₂. In some embodiments, a linker comprises (SGGS)ₙ (SEQ ID NO: 305), (GGGS)ₙ (SEQ ID NO: 300), (GGGGS)ₙ (SEQ ID NO: 301), (G)ₙ (SEQ ID NO: 302), (EAAAK)ₙ (SEQ ID NO: 303), (GGS)ₙ (SEQ ID NO: 304), SGGS(GGS)ₙ (SEQ ID NO: 307), (SGGS)ₙ-SGSETPGTSESATPES-(SGGS)ₙ (SEQ ID NO: 310), or (XP)ₙ motif (SEQ ID NO: 805), or a combination of any of these, wherein n is independently an integer between 1 and 30, and wherein X is any amino acid. In some embodiments, n is 1, 2, 3, 4, 5, 6, 7, 8, 9, 10, 11, 12, 13, 14, or 15. In some embodiments, n is 1, 3, or 7. The length of the linker can influence the base to be edited, as illustrated, for example, in International Patent Application No. PCT/US2016/058344, filed Oct. 22, 2016, published as publication number WO2017/070632 on Apr. 27, 2017, the contents of which is incorporated herein by reference. For example, a linker of 3-amino-acid long (e.g., (GGS)₁) may give a 2-5, 2-4, 2-3, 3-4 base editing window relative to the PAM sequence, while a 9-amino-acid linker (e.g., (GGS)₃ (SEQ ID NO: 311)) may give a 2-6, 2-5, 2-4, 2-3, 3-6, 3-5, 3-4, 4-6, 4-5, 5-6 base editing window relative to the PAM sequence. A 16-amino-acid linker (e.g., the XTEN linker) may give a 2-7, 2-6, 2-5, 2-4, 2-3, 3-7, 3-6, 3-5, 3-4, 4-7, 4-6, 4-5, 5-7, 5-6, 6-7 base window relative to the PAM sequence with exceptionally strong activity, and a 21-amino-acid linker (e.g., (GGS)₇ (SEQ ID NO: 312)) may give a 3-8, 3-7, 3-6, 3-5, 3-4, 4-8, 4-7, 4-6, 4-5, 5-8, 5-7, 5-6, 6-8, 6-7, 7-8 base editing window relative to the PAM sequence. Since a PAM sequence may be of varying distance to a target nucleobase in a target DNA sequence (e.g., a disease-causing mutation to be corrected in a gene), varying the linker length permits the fusion proteins described herein to edit a nucleobase at different distances from the PAM sequence. It is to be understood that the linker lengths described as examples are not meant to be limiting.

[0341] Some aspects of this disclosure provide fusion proteins comprising (i) a napDNAbp and (ii) a nucleic acid editing domain. In some embodiments, the general architecture of exemplary fusion proteins provided herein comprises the structure:
[0342] [NH₂]-[nucleic acid editing domain]-[napDNAbp]-[COOH],
[0343] [NH₂]-[nucleic acid editing domain]-[linker]-[napDNAbp]-[COOH],
[0344] [NH₂]-[napDNAbp]-[nucleic acid editing domain]-[COOH], or
[0345] [NH₂]-[napDNAbp]-[linker]-[nucleic acid editing domain]-[COOH]
   wherein NH₂ is the N-terminus of the fusion protein, and COOH is the C-terminus of the fusion protein. In some embodiments, the “]-[” used in the general architecture above indicates the presence of an optional linker sequence.

[0346] In some embodiments, the fusion protein comprises (i) a nuclease-inactive Cas9 domain; and (ii) a nucleic acid editing domain. In some embodiments, a nuclease-inactive Cas9 domain (e.g., dCas9, Cas9n), comprises an amino acid sequence that is at least 80%, at least 85%, at least 90%, at least 92%, at least 95%, at least 96%, at least 97%, at least 98%, at least 99%, or at least 99.5% identical to the amino acid sequence of a Cas9 as provided by any one of SEQ ID NOs: 10-260, and comprises mutations that inactivate the nuclease activity of Cas9. Mutations that render the nuclease domains of Cas9 inactive are well-known in the art. For example, the DNA cleavage domain of Cas9 is known to include two subdomains, the HNH nuclease subdomain and the RuvC1 subdomain. The HNH subdomain cleaves the strand complementary to the gRNA, whereas the RuvC1 subdomain cleaves the non-complementary strand. Mutations within these subdomains can silence the nuclease activity of Cas9. For example, the mutations D10A and H840A completely inactivate the nuclease activity of S. pyogenes Cas9 (Jinek et al., Science. 337:816-821(2012); Qi et al., Cell. 28; 152(5):1173-83 (2013)). In some embodiments, the nuclease inactive Cas9 domain is a dCas9 domain. In some embodiments, the nuclease inactive Cas9 domain is a Cas9n domain. In some embodiments, the nuclease inactive Cas9 domain comprises a D10A mutation of the amino acid sequence provided in SEQ ID NO: 10, or a corresponding mutation in any of the amino acid sequences provided in SEQ ID NOs: 11-260. In some embodiments, the nuclease inactive Cas9 domain comprises a H840A mutation of the amino acid sequence provided in SEQ ID NO: 10, or a corresponding mutation in any of the amino acid sequences provided in SEQ ID NOs: 11-260. In some embodiments, the nuclease inactive Cas9 domain comprises both D10A and H840A mutations of the amino acid sequence provided in SEQ ID NO: 10, or a corresponding mutation in any of the amino acid sequences provided in SEQ ID NOs: 11-260. In some embodiments, the nuclease inactive Cas9 domain comprises an amino acid sequence of SEQ ID NO: 6. In some embodiments, the nuclease inactive Cas9 further comprises a histidine residue at position 840 of the amino acid sequence provided in SEQ ID NO: 10, or a corresponding mutation in any of the amino acid sequences provided in SEQ ID NOs: 11-260. For example, the presence of the catalytic residue H840 restores the activity of the dCas9 to cleave the non-edited strand (i.e., the Cas9 domain is a Cas9 nickase) containing, for example, a G opposite the targeted C. Restoration of H840 does not result in the cleavage of the target strand containing the C. In some embodiments, the nuclease inactive Cas9 domain comprises an amino acid sequence of SEQ ID NO: 7. It is to be understood that other mutations that inactivate the nuclease domains of Cas9 may also be included in the nuclease inactive Cas9 domain (e.g., dCas9, Cas9n) of this disclosure.

[0347] The Cas9 domains or nuclease inactive Cas9 domains comprising the mutations disclosed herein may be a full-length Cas9 domain, or a fragment thereof. In some embodiments, proteins comprising a Cas9 domain, or fragments thereof, are referred to as “Cas9 variants.” A Cas9 variant shares homology to a Cas9 domain, or a fragment thereof. For example a Cas9 variant is at least about 70% identical, at least about 80% identical, at least about 90% identical, at least about 95% identical, at least about 96% identical, at least about 97% identical, at least about 98% identical, at least about 99% identical, at least about 99.5% identical, or at least about 99.9% to wild type Cas9. In some embodiments, the Cas9 variant comprises a fragment of Cas9 (e.g., a gRNA binding domain or a DNA-cleavage domain), such that the fragment is at least about 70% identical, at least about 80% identical, at least about 90% identical, at least about 95% identical, at least about 96% identical, at least about 97% identical, at least about 98% identical, at least about 99% identical, at least about 99.5% identical, or at least about 99.9% identical to the corresponding fragment of wild type Cas9, e.g., a Cas9 comprising the amino acid sequence of SEQ ID NO: 10. In some embodiments, the wild-type Cas9 domain comprises the amino acid sequence of any one of SEQ ID NOs: 10-260.

[0348] Any of the napDNAbp fusion proteins of this disclosure may further comprise a nucleic acid editing domain (e.g., an enzyme that is capable of modifying nucleic acid, such as a deaminase). In some embodiments, the nucleic acid editing domain is a DNA-editing domain. In some embodiments, the nucleic acid editing domain has deaminase activity. In some embodiments, the nucleic acid editing domain comprises or consists of a deaminase or deaminase domain. In some embodiments, the deaminase domain is a cytidine deaminase domain. In some embodiments, the cytidine deaminase domain is an apolipoprotein B mRNA-editing complex (APOBEC) family deaminase domain. In some embodiments, the cytidine deaminase domain is an APOBEC1 family deaminase domain. In some embodiments, the cytidine deaminase domain is an activation-induced cytidine deaminase (AID) domain. In some embodiments, the deaminase domain is an adenosine deaminase. In some embodiments, the adenosine deaminase domain is an ecTadA deaminase domain, or a variant thereof. Some nucleic-acid editing domains, as well as napDNAbp (e.g., Cas9 domain) fusion proteins including such domains, are described in detail herein. Additional suitable nucleic acid editing domains will be apparent to a person of ordinary skill in the art based on this disclosure and knowledge in the field.

[0349] Some aspects of the disclosure provide a fusion protein comprising a Cas9 domain fused to a nucleic acid editing domain, wherein the nucleic acid editing domain is fused to the N-terminus of the Cas9 domain. In some embodiments, the Cas9 domain and the nucleic acid editing-editing domain are fused via a linker. In some embodiments, the linker comprises a (GGGS)ₙ (SEQ ID NO: 300), a (GGGGS)ₙ (SEQ ID NO: 301), a (G)ₙ (SEQ ID NO: 302), an (EAAAK)ₙ (SEQ ID NO: 303), a (GGS)ₙ (SEQ ID NO: 304), (SGGS)ₙ (SEQ ID NO: 305), an SGSETPGTSESATPES (SEQ ID NO: 306) motif (see, e.g., Guilinger J P, Thompson D B, Liu D R. Fusion of catalytically inactive Cas9 to FokI nuclease improves the specificity of genome modification. Nat. Biotechnol. 2014; 32(6): 577-82; the entire contents are incorporated herein by reference), a SGGS(GGS)ₙ (SEQ ID NO: 307), (SGGS)ₙ-SGSETPGTSESATPES-(SGGS)ₙ (SEQ ID NO: 310), or an (XP)ₙ motif (SEQ ID NO: 805), or a combination of any of these, wherein n is independently an integer between 1 and 30. In some embodiments, n is independently 1, 2, 3, 4, 5, 6, 7, 8, 9, 10, 11, 12, 13, 14, 15, 16, 17, 18, 19, 20, 21, 22, 23, 24, 25, 26, 27, 28, 29, or 30, or, if more than one linker or more than one linker motif is present, any combination thereof. In some embodiments, the linker comprises a (GGS)ₙ motif (SEQ ID NO: 806), wherein n is 1, 2, 3, 4, 5, 6, 7, 8, 9, 10, 11, 12, 13, 14 or 15. In some embodiments, the linker comprises a (GGS)ₙ motif (SEQ ID NO: 807), wherein n is 1, 3, or 7. In some embodiments, the linker comprises the amino acid sequence SGSETPGTSESATPES (SEQ ID NO: 306). In some embodiments, the linker comprises the amino acid sequence (SGGS)₂-SGSETPGTSESATPES-(SGGS)₂ (SEQ ID NO: 308). Additional suitable linker motifs and linker configurations will be apparent to those of ordinary skill in the art. In some embodiments, suitable linker motifs and configurations include those described in Chen et al., Fusion protein linkers: property, design and functionality. Adv Drug Deliv Rev. 2013; 65(10):1357-69, the entire contents of which are incorporated herein by reference. Additional suitable linker sequences will be apparent to those of ordinary skill in the art based on the instant disclosure. In some embodiments, the general architecture of exemplary Cas9 fusion proteins provided herein comprises the structure:
[0350] [NH₂]-[nucleic acid editing domain]-[Cas9 domain]-[COOH] or
[0351] [NH₂]-[nucleic acid editing domain]-[linker]-[Cas9 domain]-[COOH],
   wherein NH₂ is the N-terminus of the fusion protein, and COOH is the C-terminus of the fusion protein. In some embodiments, the “]-[” used in the general architecture above indicates the presence of an optional linker sequence.

[0352] The fusion proteins of the present disclosure may comprise one or more additional features. For example, in some embodiments, the fusion protein comprises a nuclear localization sequence (NLS). In some embodiments, the NLS of the fusion protein is localized between the nucleic acid editing domain and the Cas9 domain. In some embodiments, the NLS of the fusion protein is localized C-terminal to the Cas9 domain. In some embodiments, the NLS comprises the amino acid sequence of SEQ ID NO: 520. In some embodiments, the NLS comprises the amino acid sequence of SEQ ID NO: 521.

[0353] Other exemplary features that may be present are localization sequences, such as cytoplasmic localization sequences, export sequences, such as nuclear export sequences, or other localization sequences, as well as sequence tags that are useful for solubilization, purification, or detection of the fusion proteins. Suitable protein tags provided herein include, but are not limited to, biotin carboxylase carrier protein (BCCP) tags, myc-tags, calmodulin-tags, FLAG-tags, hemagglutinin (HA)-tags, polyhistidine tags, also referred to as histidine tags or His-tags, maltose binding protein (MBP)-tags, nus-tags, glutathione-S-transferase (GST)-tags, green fluorescent protein (GFP)-tags, thioredoxin-tags, S-tags, Softags (e.g., Softag 1, Softag 3), strep-tags, biotin ligase tags, FlAsH tags, V5 tags, and SBP-tags. Additional suitable sequences will be apparent to those of ordinary skill in the art. In some embodiments, the fusion protein comprises one or more His tags.

[0354] In some embodiments, the nucleic acid editing domain is a deaminase. In some embodiments, the deaminase is a cytidine deaminase. For example, in some embodiments, the general architecture of exemplary Cas9 fusion proteins with a cytidine deaminase domain comprises the structure:
[0355] [NH₂]-[NLS]-[cytidine deaminase]-[Cas9]-[COOH],
[0356] [NH₂]-[Cas9]-[cytidine deaminase]-[COOH],
[0357] [NH₂]-[cytidine deaminase]-[Cas9]-[COOH], or
[0358] [NH₂]-[cytidine deaminase]-[Cas9]-[NLS]-[COOH]
   wherein NLS is a nuclear localization sequence, NH₂ is the N-terminus of the fusion protein, and COOH is the C-terminus of the fusion protein. Nuclear localization sequences are known in the art and would be apparent to the skilled artisan. For example, NLS sequences are described in Plank et al., PCT/EP2000/011690, the contents of which are incorporated herein by reference for their disclosure of exemplary nuclear localization sequences. In some embodiments, a NLS comprises the amino acid sequence PKKKRKV (SEQ ID NO: 520) or MDSLLMNRRKFLYQFKNVRWAKGRRETYLC (SEQ ID NO: 521). In some embodiments, a linker is inserted between the Cas9 and the cytidine deaminase. In some embodiments, the NLS is located C-terminal of the Cas9 domain. In some embodiments, the NLS is located N-terminal of the Cas9 domain. In some embodiments, the NLS is located between the cytidine deaminase and the Cas9 domain. In some embodiments, the NLS is located N-terminal of the cytidine deaminase domain. In some embodiments, the NLS is located C-terminal of the cytidine deaminase domain. In some embodiments, the “]-[” used in the general architecture above indicates the presence of an optional linker sequence.

[0359] In some embodiments, the fusion protein comprises any one of nucleic acid editing domains provided herein. In some embodiments, the nucleic acid editing domain is a cytidine deaminase domain provided herein. In some embodiments, the nucleic acid editing domain is a cytidine deaminase domain comprising the amino acid sequence set for in any one of SEQ ID NOs: 350-389.

[0360] In some embodiments, the cytidine deaminase domain and the Cas9 domain are fused to each other via a linker. Various linker lengths and flexibilities between the deaminase domain (e.g., AID, APOBEC family deaminase) and the Cas9 domain can be employed, for example, ranging from very flexible linkers of the form (GGGS)ₙ (SEQ ID NO: 300), (GGGGS)ₙ (SEQ ID NO: 301), (GGS)ₙ (SEQ ID NO: 304), and (G)ₙ (SEQ ID NO: 302), to more rigid linkers of the form (EAAAK)ₙ (SEQ ID NO: 303), (SGGS)ₙ (SEQ ID NO: 305), SGGS(GGS)ₙ (SEQ ID NO: 307), SGSETPGTSESATPES (SEQ ID NO: 306) (see, e.g., Guilinger J P, Thompson D B, Liu D R. Fusion of catalytically inactive Cas9 to FokI nuclease improves the specificity of genome modification. Nat. Biotechnol. 2014; 32(6): 577-82; the entire contents are incorporated herein by reference), (SGGS)ₙ-SGSETPGTSESATPES-(SGGS)ₙ (SEQ ID NO: 310), and (XP)ₙ (SEQ ID NO: 805), wherein n is an integer between 1 and 30, inclusive, in order to achieve the optimal length for deaminase activity for the specific application. In some embodiments, the linker comprises a (GGS)ₙ motif (SEQ ID NO: 807), wherein n is 1, 3, or 7. In some embodiments, the linker comprises a SGSETPGTSESATPES (SEQ ID NO: 306) motif. In some embodiments, the linker comprises a (SGGS)₂—SGSETPGTSESATPES-(SGGS)₂ (SEQ ID NO: 308) motif.

[0361] In some embodiments, the fusion protein comprises a nuclease-inactive Cas9 domain (e.g., a dCas9 domain or a Cas9n domain) fused to a cytidine deaminase domain, wherein the fusion protein comprises or consists of the amino acid sequence of any one of SEQ ID NOs: 540-542.

BE1 for bacterial cell (e.g., E. Coli) expression (His₆-rAPOBEC1-XTEN-dCas9)
“His₆” disclosed as SEQ ID NO: 803))
(SEQ ID NO: 540)
MGSSHHHHHHMSSETGPVAVDPTLRRRIEPHEFEVFFDPRELRKETCLLYEINWGGRHSIWRHTSQNTN
KHVEVNFIEKFTTERYFCPNTRCSITWFLSWSPCGECSRAITEFLSRYPHVTLFIYIARLYHHADPRNRQGL
RDLISSGVTIQIMTEQESGYCWRNFVNYSPSNEAHWPRYPHLWVRLYVLELYCIILGLPPCLNILRRKQPQ
LTFFTIALQSCHYQRLPPHILWATGLKSGSETPGTSESATPESDKKYSIGLAIGTNSVGWAVITDEYKVPSK
KFKVLGNTDRHSIKKNLIGALLFDSGETAEATRLKRTARRRYTRRKNRICYLQEIFSNEMAKVDDSFFHRL
EESFLVEEDKKHERHPIFGNIVDEVAYHEKYPTIYHLRKKLVDSTDKADLRLIYLALAHMIKFRGHFLIEGDL
NPDNSDVDKLFIQLVQTYNQLFEENPINASGVDAKAILSARLSKSRRLENLIAQLPGEKKNGLFGNLIALSL
GLTPNFKSNFDLAEDAKLQLSKDTYDDDLDNLLAQIGDQYADLFLAAKNLSDAILLSKILRVNTEITKAPLSA
SMIKRYDEHHQDLTLLKALVRQQLPEKYKEIFFDQSKNGYAGYIDGGASQEEFYKFIKPILEKMDGTEELL
VKLNREDLLRKQRTFDNGSIPHQIHLGELHAILRRQEDFYPFLKDNREKIEKILTFRIPYYVGPLARGNSRF
AWMTRKSEETITPWNFEEVVDKGASAQSFIERMTNFDKNLPNEKVLPKHSLLYEYFTVYNELTKVKYVTE
GMRKPAFLSGEQKKAIVDLLFKTNRKVTVKQLKEDYFKKIECFDSVEISGVEDRFNASLGTYHDLLKIIKDK
DFLDNEENEDILEDIVLTLTLFEDREMIEERLKTYAHLFDDKVMKQLKRRRYTGWGRLSRKLINGIRDKQS
GKTILDFLKSDGFANRNFMQLIHDDSLTFKEDIQKAQVSGQGDSLHEHIANLAGSPAIKKGILQTVKVVDEL
VKVMGRHKPENIVIEMARENQTTQKGQKNSRERMKRIEEKIGELGSQILKEHPVENTQLQNEKYLYYYLQ
NGRDMYVDQELDINRLSDYDVDAIVPQSFLKDDSIDNKVLTRSDKNRGKSDNVPSEEVVKKMKNYWRQL
LNAKLITQRKFDNLTKAERGGLSELDKAGFIKRQLVETRQITKHVAQILDSRMNTKYDENDKLIREVKVITLK
SKLVSDFRKDFQFYKVREINNYHHAHDAYLNAVVGTALIKKYPKLESEFVYGDYKVYDVRKMIAKSEQEIG
KATAKYFFYSNIMNFFKTEITLANGEIRKRPLIETNGETGEIVWDKGRDFATVRKVLSMPQVNIVKKTEVQT
GGFSKESILPKRNSDKLIARKKDWDPKKYGGFDSPTVAYSVLVVAKVEKGKSKKLKSVKELLGITIMERSS
FEKNPIDFLEAKGYKEVKKDLIIKLPKYSLFELENGRKRMLASAGELQKGNELALPSKYVNFLYLASHYEKL
KGSPEDNEQKQLKFVQHKHYLDEIIEQISEFSKRVILADANLDKVLSAYNKHRDKPIREQAENIIHLFTLTNL
GAPAAFKYFDTTIDRKRYTSTKEVLDATLIHQSITGLYETRIDLSQLGGDSGGSPKKKRKV
BE1 for expression in eukaryotic cells (e.g., mammalian cells) (rAPOBEC1-XTEN-
dCas9-NLS)
(SEQ ID NO: 541)
MSSETGPVAVDPTLRRRIEPHEFEVFFDPRELRKETCLLYEINWGGRHSIWRHTSQNTNKHVEVNFIEKF
TTERYFCPNTRCSITWFLWSPCGECSRAITEFLSRYPHVTLFIYIARLYHHADPRNRQGLRDLISSGVTIQ
IMTEQESGYCWRNFVNYSPSNEAHWPRYPHLWVRLYVLELYCIILGLPPCLNILRRKQPQLTFFTIALQSC
HYQRLPPHILWATGLKSGSETPGTSESATPESDKKYSIGLAIGTNSVGWAVITDAYKVPSKKFKVLGNTDR
HSIKKNLIGALLFDSGETAETRLKRTARRRYTRRKNRICYLQEIFSNEMAKVDDSFFHRLEESFLVEEDKK
HERHPIFGNIVDEVAYHEKYPTIYHLRKKLVDSTDKADLRIYLALAHMIKFRGHFLIEGDLNPDNSDVDKLF
IQLVQTYNQLFEENPINASGVDAKAILSARLSKSRRLENLIAQLPGEKKNGLFGNLIALSLGLTPNFKSNFDL
AEDAKLQLSKDTYDDDLDNLLAQIGDQYADLFLAAKNLSDAILLSDILRVNTEITKAPLSASMIKRYDEHHQ
DLTLLKALVRQQLPEKYKEIFFDQSKNGYAGYIDGGASQEEFYKFIKPILEKMDGTEELLVKLNREDLLRKQ
RTFDNGSIPHQIHLGELHAILRRQEDFYPFLKDNREKIEKILTFRIPYYVGPLARGNSRFAWMTRKSEETITP
WNFEEVVDKGASAQSFIERMTNFDKNLPNEKVLPKHSLLYEYFTVYNELTKVKYVTEGMRKPAFLSGEQ
KKAIVDLLFKTNRKVTVKQLKEDYFKKIECFDSVEISGVEDRFNASLGTYHDLLKIIKDKDFLDNEENEDILE
DIVLTLTLFEDREMIEERLKTYAHLFDDKVMKQLKRRRYTGWGRLSRKLINGIRDKQSGKTILDFLKSDGFA
NRNFMQLIHDDSLTFKEDIQKAQVSGQGDSLHEHIANLAGSPAIKKGILQTVKVVDELVKVMGRHKPENIVI
EMARENQTTQKGQKNSRERMKRIEEGIKELGSQILKEHPVENTQLQNEKLYLYYLQNGRDMYVDQELDI
NRLSDYDVDAIVPQSFLKDDSIDNKVLTRSDKNRGKSDNVPSEEVVKKMKNYWRQLLNAKLITQRKFDNL
TKAERGGLSELDKAGFIKRQLVETRQITKHVAQILDSRMNTKYDENDDKLIREVKVITLKSKLVSDFRKDFQF
YKVREINNYHHAHDAYLNAVVGTALIKKYPKLESEFVYGDYKVYDVRKMIAKSEQEIGKATAKYFFYSNIM
NFFKTEITLANGEIRKRPLIETNGETGEIVWDKGRDFATVRKVLSMPQVNIVKKTEVQTGGFSKESILPKRN
SDKLIARKKDWDPKKYGGFDSPTVAYSVLVVAKVEKGKSKKLKSVKELLGITIMERSSFEKNPIDFLEAKG
YKEVKKDLIIKLPKYSLFELENGRKRMLASAGELQKGNELALPSKYVNFLYLASHYEKLKGSPEDNEQKQL
FVEQHKHYLDEIIEQISEFSKRVILADANLDKVLSAYNKHRDKPIREQAENIIHLFTLTNLGAPQQFKYFDTTI
DRKRYTSTKEVLDATLIHQSITGLYETRIDLSQLGGDSGGSPKKKRKV
Alternative BE1 for expression in eukaryotic cells (e.g., mammalian cells) with
human APOBEC1 (hAPOBEC1-XTEN-dCas9-NLS)
(SEQ ID NO: 542)
MTSEKGPSTGDPTLRRRIEPWEFDVFYDPRELRKEACLLYEIKWGMSRKIWRSSGKNTTNHVEVNFIKKFTSER
DFHPSMSCSITWFLSWSPCWECSQAIREFLSRHPGVTLVIYVARLFWHMDQQNRQGLRDLVNSGVTIQIMRASE
YYHCWRNFVNYPPGDEAHWPQYPPLWMMLYALELHCIILSLPPCLKISRRWQNHLTFFRLHLQNCHYQTIPPHI
LLATGLIHPSVAWRGSETPGTSESATPESDKKYSIGLAIGTNSVGWAVITDEYKVPSKKFKVLGNTDRHSIKKN
LIGALLFDSGETAEATRLKRTARRRYTRRKNRICYLQEIFSNEMAKVDDSFFHRLEESFLVEEDKKHERHPIFG
NIVDEVAYHEKYPTIYHLRKKLVDSTDKADLRLIYLALAHMIKFRGHFLIEGDLNPDNSDVDKLFIQLVQTYNQ
LFEENPINASGVDAKAILSARLSKSRRLENLIAQLPGEKKNGLFGNLIALSLGLTPNFKSNFDLAEDAKLQLSK
DTYDDDLDNLLAQIGDQYADLFLAAKNLSDAILLSDILRVNTEITKAPLSASMIKRYDEHHQDLTLLKALVRQQ
LPEKYKEIFFDQSKNGYAGYIDGGASQEEFYKFIKPILEKMDGTEELLVKLNREDLLRKQRTFDNGSIPHQIHL
GELHAILRRQEDFYPFLKDNREKIEKILTFRIPYYVGPLARGNSRFAWMTRKSEETITPWNFEEVVDKGASAQS
FIERMTNFDKNLPNEKVLPKHSLLYEYFTVYNELTKVKYVTEGMRKPAFLSGEQKKAIVDLLFKTNRKVTVKQL
KEDYFKKIECFDSVEISGVEDRFNASLGTYHDLLKIIKDKDFLDNEENEDILEDIVLTLTLFEDREMIEERLKT
YAHLFDDKVMKQLKRRRYTGWGRLSRKLINGIRDKQSGKTILDFLKSDGFANRNFMQLIHDDSLTFKEDIQKAQ
VSGQGDSLHEHIANLAGSPAIKKGILQTVKVVDELVKVMGRHKPENIVIEMARENQTTQKGQKNSRERMKRIEE
GIKELGSQILKEHPVENTQLQNEKLYLYYLQNGRDMYVDQELDINRLSDYDVDAIVPQSFLKDDSIDNKVLTRS
DKNRGKSDNVPSEEVVKKMKNYWRQLLNAKLITQRKFDNLTKAERGGLSELDKAGFIKRQLVETRQITKHVAQI
LDSRMNTKYDENDKLIREVKVITLKSKLVSDFRKDFQFYKVREINNYHHAHDAYLNAVVGTALIKKYPKLESEF
VYGDYKVYDVRKMIAKSEQEIGKATAKYFFYSNIMNFFKTEITLANGEIRKRPLIETNGETGEIVWDKGRDFAT
VRKVLSMPQVNIVKKTEVQTGGFSKESILPKRNSDKLIARKKDWDPKKYGGFDSPTVAYSVLVVAKVEKGKSKK
LKSVKELLGITIMERSSFEKNPIDFLEAKGYKEVKKDLIIKLPKYSLFELENGRKRMLASAGELQKGNELALPS
KYVNFLYLASHYEKLKGSPEDNEQKQLFVEQHKHYLDEIIEQISEFSKRVILADANLDKVLSAYNKHRDKPIRE
QAENIIHLFTLTNLGAPAAFKYFDTTIDRKRYTSTKEVLDATLIHQSITGLYETRIDLSQLGGDSGGSPKKKRK
V

[0362] Some aspects of the disclosure relate to fusion proteins that comprise a uracil glycosylase inhibitor (UGI) domain. In some embodiments, any of the fusion proteins provided herein that comprise a Cas9 domain (e.g., a nuclease active Cas9 domain, a nuclease inactive dCas9 domain, or a Cas9 nickase) may be further fused to a UGI domain either directly or via a linker. Some aspects of this disclosure provide deaminase-dCas9 fusion proteins, deaminase-nuclease active Cas9 fusion proteins and deaminase-Cas9 nickase fusion proteins with increased nucleobase editing efficiency. Without wishing to be bound by any particular theory, cellular DNA-repair response to the presence of U:G heteroduplex DNA may be responsible for the decrease in nucleobase editing efficiency in cells. For example, uracil DNA glycosylase (UDG) catalyzes removal of U from DNA in cells, which may initiate base excision repair, with reversion of the U:G pair to a C:G pair as the most common outcome. As demonstrated in the Examples below, Uracil DNA Glycosylase Inhibitor (UGI) may inhibit human UDG activity. Thus, this disclosure contemplates a fusion protein comprising a napDNAbp (e.g, a Cas9 nuclease, dCas9, or Cas9n) and a nucleic acid editing domain (e.g., a deaminase) further fused to a UGI domain. In some embodiments, the fusion protein comprising a Cas9 nickase-nucleic acid editing domain further fused to a UGI domain. In some embodiments, the fusion protein comprising a dCas9-nucleic acid editing domain further fused to a UGI domain. It should be understood that the use of a UGI domain may increase the editing efficiency of a nucleic acid editing domain that is capable of catalyzing, for example, a C to U change. For example, fusion proteins comprising a UGI domain may be more efficient in deaminating C residues.

[0363] In some embodiments, the fusion protein comprises the structure:
[0364] [nucleic acid editing domain]-[optional linker sequence]-[napDNAbp]-[optional linker sequence]-[UGI];
[0365] [nucleic acid editing domain]-[optional linker sequence]-[UGI]-[optional linker sequence]-[napDNAbp];
[0366] [UGI]-[optional linker sequence]-[nucleic acid editing domain]-[optional linker sequence]-[napDNAbp];
[0367] [UGI]-[optional linker sequence]-[napDNAbp]-[optional linker sequence]-[nucleic acid editing domain];
[0368] [napDNAbp]-[optional linker sequence]-[nucleic acid editing domain]-[optional linker sequence]-[UGI]; or
[0369] [napDNAbp]-[optional linker sequence]-[UGI]-[optional linker sequence]-[nucleic acid editing domain].

[0370] In some embodiments, the fusion protein comprises the structure:
[0371] [deaminase]-[optional linker sequence]-[dCas9]-[optional linker sequence]-[UGI];
[0372] [deaminase]-[optional linker sequence]-[UGI]-[optional linker sequence]-[dCas9];
[0373] [UGI]-[optional linker sequence]-[deaminase]-[optional linker sequence]-[dCas9];
[0374] [UGI]-[optional linker sequence]-[dCas9]-[optional linker sequence]-[deaminase];
[0375] [dCas9]-[optional linker sequence]-[deaminase]-[optional linker sequence]-[UGI]; or
[0376] [dCas9]-[optional linker sequence]-[UGI]-[optional linker sequence]-[deaminase].

[0377] In other embodiments, the fusion protein comprises the structure:
[0378] [deaminase]-[optional linker sequence]-[Cas9 nickase]-[optional linker sequence]-[UGI];
[0379] [deaminase]-[optional linker sequence]-[UGI]-[optional linker sequence]-[Cas9 nickase];
[0380] [UGI]-[optional linker sequence]-[deaminase]-[optional linker sequence]-[Cas9 nickase];
[0381] [UGI]-[optional linker sequence]-[Cas9 nickase]-[optional linker sequence]-[deaminase];
[0382] [Cas9 nickase]-[optional linker sequence]-[deaminase]-[optional linker sequence]-[UGI]; or
[0383] [Cas9 nickase]-[optional linker sequence]-[UGI]-[optional linker sequence]-[deaminase].

[0384] In some embodiments, the fusion protein comprises the structure:
[0385] [cytidine deaminase]-[optional linker sequence]-[dCas9]-[optional linker sequence]-[UGI];
[0386] [cytidine deaminase]-[optional linker sequence]-[UGI]-[optional linker sequence]-[dCas9];
[0387] [UGI]-[optional linker sequence]-[cytidine deaminase]-[optional linker sequence]-[dCas9];
[0388] [UGI]-[optional linker sequence]-[dCas9]-[optional linker sequence]-[cytidine deaminase];
[0389] [dCas9]-[optional linker sequence]-[cytidine deaminase]-[optional linker sequence]-[UGI]; or
[0390] [dCas9]-[optional linker sequence]-[UGI]-[optional linker sequence]-[cytidine deaminase].

[0391] In other embodiments, the fusion protein comprises the structure:
[0392] [cytidine deaminase]-[optional linker sequence]-[Cas9 nickase]-[optional linker sequence]-[UGI];
[0393] [cytidine deaminase]-[optional linker sequence]-[UGI]-[optional linker sequence]-[Cas9 nickase];
[0394] [UGI]-[optional linker sequence]-[cytidine deaminase]-[optional linker sequence]-[Cas9 nickase];
[0395] [UGI]-[optional linker sequence]-[Cas9 nickase]-[optional linker sequence]-[cytidine deaminase];
[0396] [Cas9 nickase]-[optional linker sequence]-[cytidine deaminase]-[optional linker sequence]-[UGI]; or
[0397] [Cas9 nickase]-[optional linker sequence]-[UGI]-[optional linker sequence]-[cytidine deaminase].

[0398] In some embodiments, the fusion proteins provided herein do not comprise a linker sequence. In some embodiments, one or both of the optional linker sequences are present.

[0399] In some embodiments, the “-” used in the general architecture above indicates the presence of an optional linker sequence. In some embodiments, the fusion proteins comprising a UGI further comprise a nuclear targeting sequence, for example a nuclear localization sequence. In some embodiments, fusion proteins provided herein further comprise a nuclear localization sequence (NLS). In some embodiments, the NLS is fused to the N-terminus of the fusion protein. In some embodiments, the NLS is fused to the C-terminus of the fusion protein. In some embodiments, the NLS is fused to the N-terminus of the UGI protein. In some embodiments, the NLS is fused to the C-terminus of the UGI protein. In some embodiments, the NLS is fused to the N-terminus of the Cas9 protein. In some embodiments, the NLS is fused to the C-terminus of the Cas9 protein. In some embodiments, the NLS is fused to the N-terminus of the deaminase. In some embodiments, the NLS is fused to the C-terminus of the deaminase. In some embodiments, the NLS is fused to the N-terminus of the second Cas9. In some embodiments, the NLS is fused to the C-terminus of the second Cas9. In some embodiments, the NLS is fused to the fusion protein via one or more linkers. In some embodiments, the NLS is fused to the fusion protein without a linker. In some embodiments, the NLS comprises an amino acid sequence of any one of the NLS sequences provided or referenced herein. In some embodiments, the NLS comprises an amino acid sequence as set forth in SEQ ID NO: 520 or SEQ ID NO: 521.

[0400] In some embodiments, a UGI domain comprises a wild-type UGI or a UGI as set forth in SEQ ID NO: 500. In some embodiments, the UGI proteins provided herein include fragments of UGI and proteins homologous to a UGI or a UGI fragment. For example, in some embodiments, a UGI domain comprises a fragment of the amino acid sequence set forth in SEQ ID NO: 500. In some embodiments, a UGI fragment comprises an amino acid sequence that comprises at least 60%, at least 65%, at least 70%, at least 75%, at least 80%, at least 85%, at least 90%, at least 95%, at least 96%, at least 97%, at least 98%, at least 99%, or at least 99.5% of the amino acid sequence as set forth in SEQ ID NO: 500. In some embodiments, a UGI comprises an amino acid sequence homologous to the amino acid sequence set forth in SEQ ID NO: 500 or an amino acid sequence homologous to a fragment of the amino acid sequence set forth in SEQ ID NO: 500. In some embodiments, proteins comprising UGI or fragments of UGI or homologs of UGI or UGI fragments are referred to as “UGI variants.” A UGI variant shares homology to UGI, or a fragment thereof. For example a UGI variant is at least 70% identical, at least 75% identical, at least 80% identical, at least 85% identical, at least 90% identical, at least 95% identical, at least 96% identical, at least 97% identical, at least 98% identical, at least 99% identical, at least 99.5% identical, or at least 99.9% identical to a wild type UGI or a UGI as set forth in SEQ ID NO: 500. In some embodiments, the UGI variant comprises a fragment of UGI, such that the fragment is at least 70% identical, at least 80% identical, at least 90% identical, at least 95% identical, at least 96% identical, at least 97% identical, at least 98% identical, at least 99% identical, at least 99.5% identical, or at least 99.9% to the corresponding fragment of wild-type UGI or a UGI as set forth in SEQ ID NO: 500. In some embodiments, the UGI comprises the following amino acid sequence:

Uracil-DNA glycosylase inhibitor (>sp|P14739|
UNGI_BPPB2)
(SEQ ID NO: 500)
MTNLSDIIEKETGKQLVIQESILMLPEEVEEVIGNKPESDILVHTAYDE
STDENVMLLTSDAPEYKPWALVIQDSNGENKIKML

[0401] Suitable UGI protein and nucleotide sequences are provided herein and additional suitable UGI sequences are known to those in the art, and include, for example, those published in Wang et al., Uracil-DNA glycosylase inhibitor gene of bacteriophage PBS2 encodes a binding protein specific for uracil-DNA glycosylase. J. Biol. Chem. 264:1163-1171(1989); Lundquist et al., Site-directed mutagenesis and characterization of uracil-DNA glycosylase inhibitor protein. Role of specific carboxylic amino acids in complex formation with Escherichia coli uracil-DNA glycosylase. J. Biol. Chem. 272:21408-21419(1997); Ravishankar et al., X-ray analysis of a complex of Escherichia coli uracil DNA glycosylase (EcUDG) with a proteinaceous inhibitor. The structure elucidation of a prokaryotic UDG. Nucleic Acids Res. 26:4880-4887(1998); and Putnam et al., Protein mimicry of DNA from crystal structures of the uracil-DNA glycosylase inhibitor protein and its complex with Escherichia coli uracil-DNA glycosylase. J. Mol. Biol. 287:331-346(1999), the entire contents of each of which are incorporated herein by reference.

[0402] It should be appreciated that additional proteins may be uracil glycosylase inhibitors. For example, other proteins that are capable of inhibiting (e.g., sterically blocking) a uracil-DNA glycosylase base-excision repair enzyme are within the scope of this disclosure. Additionally, any proteins that block or inhibit base-excision repair as also within the scope of this disclosure. In some embodiments, a protein that binds DNA is used. In another embodiment, a substitute for UGI is used. In some embodiments, a uracil glycosylase inhibitor is a protein that binds single-stranded DNA. For example, a uracil glycosylase inhibitor may be a Erwinia tasmaniensis single-stranded binding protein. In some embodiments, the single-stranded binding protein comprises the amino acid sequence (SEQ ID NO: 501). In some embodiments, a uracil glycosylase inhibitor is a protein that binds uracil. In some embodiments, a uracil glycosylase inhibitor is a protein that binds uracil in DNA. In some embodiments, a uracil glycosylase inhibitor is a catalytically inactive uracil DNA-glycosylase protein. In some embodiments, a uracil glycosylase inhibitor is a catalytically inactive uracil DNA-glycosylase protein that does not excise uracil from the DNA. For example, a uracil glycosylase inhibitor is a UdgX. In some embodiments, the UdgX comprises the amino acid sequence (SEQ ID NO: 502). As another example, a uracil glycosylase inhibitor is a catalytically inactive UDG. In some embodiments, a catalytically inactive UDG comprises the amino acid sequence (SEQ ID NO: 503). It should be appreciated that other uracil glycosylase inhibitors would be apparent to the skilled artisan and are within the scope of this disclosure. In some embodiments, a uracil glycosylase inhibitor is a protein that is homologous to any one of SEQ ID NOs: 501-503. In some embodiments, a uracil glycosylase inhibitor is a protein that is at least 50% identical, at least 55% identical, at least 60% identical, at least 65% identical, at least 70% identical, at least 75% identical, at least 80% identical at least 85% identical, at least 90% identical, at least 95% identical, at least 96% identical, at least 98% identical, at least 99% identical, or at least 99.5% identical to any one of SEQ ID NOs: 501-503.

Erwinia tasmaniensis SSB (themostable single-
stranded DNA binding protein)
(SEQ ID NO: 501)
MASRGVNKVILVGNLGQDPEVRYMPNGGAVANITLATSESWRDKQTGET
KEKTEWHRVVLFGKLAEVAGEYLRKGSQVYIEGALQTRKWTDQAGVEKY
TTEVVVNVGGTMQMLGGRSQGGGASAGGQNGGSNNGWGQPQQPQGGNQF
SGGAQQQARPQQQPQQNNAPANNEPPIDFDDDIP
UdgX (binds to Uracil in DNA but does not excise)
(SEQ ID NO: 502)
MAGAQDFVPHTADLAELAAAAGECRGCGLYRDATQAVFGAGGRSARIMM
IGEQPGDKEDLAGLPFVGPAGRLLDRALEAADIDRDALYVTNAVKHFKF
TRAAGGKRRIHKTPSRTEVVACRPWLIAEMTSVEPDVVVLLGATAAKAL
LGNDFRVTQHRGEVLHVDDVPGDPALVATVHPSSLLRGPKEERESAFAG
LVDDLRVAADVRP
UDG (catalytically inactive human UDG, binds to
Uracil in DNA but does not excise)
(SEQ ID NO: 503)
MIGQKTLYSFFSPSPARKRHAPSPEPAVQGTGVAGVPEESGDAAAIPAK
KAPAGQEEPGTPPSSPLSAEQLDRIQRNKAAALLRLAARNVPVGFGESW
KKHLSGEFGKPYFIKLMGFVAEERKHYTVYPPPHQVFTWTQMCDIKDVK
VVILGQEPYHGPNQAHGLCFSVQRPVPPPPSLENIYKELSTDIEDFVHP
GHGDLSGWAKQGVLLLNAVLTVRAHQANSHKERGWEQFTDAVVSWLNQN
SNGLVFLLWGSYAQKKGSAIDRKRHHVLQTAHPSPLSVYRGFFGCRHFS
KTNELLQKSGKKPIDWKEL

[0403] In some embodiments, the fusion protein comprises a nuclease-inactive Cas9 domain (e.g., a dCas9 domain or a Cas9n domain) fused to a cytidine deaminase domain, wherein the fusion protein comprises or consists of the amino acid sequence of any one of SEQ ID NOs: 543-550. In some embodiments, the fusion protein comprises or consists of the amino acid sequence of SEQ ID NO: 543. In some embodiments, the fusion protein comprises or consists of the amino acid sequence of SEQ ID NO: 544.

BE2 (rAPOBEC1-XTEN-dCas9-UGI)
(SEQ ID NO: 543)
MSSETGPVAVDPTLRRRIEPHEFEVFFDPRELRKETCLLYEINWGGRHSIWRHTSQNTNKHVEVNFIEKETTE
RYFCPNTRCSITWELSWSPCGECSRAITEFLSRYPHVTLFIYIARLYHHADPRNRQGLRDLISSGVTIQIMTE
QESGYCWRNFVNYSPSNEAHWPRYPHLWVRLYVLELYCIILGLPPCLNILRRKQPQLTFFTIALQSCHYQRLP
PHILWATGLKSGSETPGTSESATPESDKKYSIGLAIGTNSVGWAVITDEYKVPSKKFKVLGNTDRHSIKKNLI
GALLFDSGETAEATRLKRTARRRYTRRKNRICYLQEIFSNEMAKVDDSFFHRLEESFLVEEDKKHERHPIFGN
IVDEVAYHEKYPTIYHLRKKLVDSTDKADLRLIYLALAHMIKFRGHFLIEGDLNPDNSDVDKLFIQLVQTYNQ
LFEENPINASGVDAKAILSARLSKSRRLENLIAQLPGEKKNGLFGNLIALSLGLTPNFKSNFDLAEDAKLQLS
KDTYDDDLDNLLAQIGDQYADLFLAAKNLSDAILLSDILRVNTEITKAPLSASMIKRYDEHHQDLTLLKALVR
QQLPEKYKEIFFDQSKNGYAGYIDGGASQEEFYKFIKPILEKMDGTEELLVKLNREDLLRKQRTFDNGSIPHQ
IHLGELHAILRRQEDFYPFLKDNREKIEKILTFRIPYYVGPLARGNSRFAWMTRKSEETITPWNFEEVVDKGA
SAQSFIERMTNFDKNLPNEKVLPKHSLLYEYFTVYNELTKVKYVTEGMRKPAFLSGEQKKAIVDLLFKTNRKV
TVKQLKEDYFKKIECFDSVEISGVEDRFNASLGTYHDLLKIIKDKDFLDNEENEDILEDIVLTLTLFEDREMI
EERLKTYAHLFDDKVMKQLKRRRYTGWGRLSRKLINGIRDKQSGKTILDFLKSDGFANRNFMQLIHDDSLTFK
EDIQKAQVSGQGDSLHEHIANLAGSPAIKKGILQTVKVVDELVKVMGRHKPENIVIEMARENQTTQKGQKNSR
ERMKRIEEGIKELGSQILKEHPVENTQLQNEKLYLYYLQNGRDMYVDQELDINRLSDYDVDAIVPQSFLKDDS
IDNKVLTRSDKNRGKSDNVPSEEVVKKMKNYWRQLLNAKLITQRKFDNLTKAERGGLSELDKAGFIKRQLVET
RQITKHVAQILDSRMNTKYDENDKLIREVKVITLKSKLVSDFRKDFQFYKVREINNYHHAHDAYLNAVVGTAL
IKKYPKLESEFVYGDYKVYDVRKMIAKSEQEIGKATAKYFFYSNIMNFFKTEITLANGEIRKRPLIETNGETG
EIVWDKGRDFATVRKVLSMPQVNIVKKTEVQTGGFSKESILPKRNSDKLIARKKDWDPKKYGGFDSPTVAYSV
LVVAKVEKGKSKKLKSVKELLGITIMERSSFEKNPIDFLEAKGYKEVKKDLIIKLPKYSLFELENGRKRMLAS
AGELQKGNELALPSKYVNFLYLASHYEKLKGSPEDNEQKQLFVEQHKHYLDEIIEQISEFSKRVILADANLDK
VLSAYNKHRDKPIREQAENIIHLFTLTNLGAPAAFKYFDTTIDRKRYTSTKEVLDATLIHQSITGLYETRIDL
SQLGGDSGGSTNLSDIIEKETGKQLVIQESILMLPEEVEEVIGNKPESDILVHTAYDESTDENVMLLTSDAPE
YKPWALVIQDSNGENKIKML
BE2 with NLS (rAPOBEC1-XTEN-dCas9-UGI-NLS)
(SEQ ID NO: 550)
MSSETGPVAVDPTLRRRIEPHEFEVFFDPRELRKETCLLYEINWGGRHSIWRHTSQNTNKHVEVNFIEKF
TTERYFCPNTRCSITWFLSWSPCGECSRAITEFLSRYPHVTLFIYIARLYHHADPRNRQGLRDLISSGVTIQ
IMTEQESGYCWRNFVNYSPSNEAHWPRYPHLWVRLYVLELYCIILGLPPCLNILRRKQPQLTFFTIALQSC
HYQRLPPHILWATGLKSGSETPGTSESATPESDKKYSIGLAIGTNSVGWAVITDEYKVPSKKFKVLGNTDR
HSIKKNLIGALLFDSGETAEATRLKRTARRRYTRRKNRICYLQEIFSNEMAKVDDSFFHRLEESFLVEEDKK
HERHPIFGNIVDEVAYHEKYPTIYHLRKKLVDSTDKADLRLIYLALAHMIKFRGHFLIEGDLNPDNSDVDKLF
IQLVQTYNQLFEENPINASGVDAKAILSARLSKSRRLENLIAQLPGEKKNGLFGNLIALSLGLTPNFKSNFDL
AEDAKLQLSKDTYDDDLDNLLAQIGDQYADLFLAAKNILSDAILLSDILRVNTEITKAPLSASMIKRYDEHHQ
DLTLLKALVRQQLPEKYKEIFFDQSKNGYAGYIDGGASQEEFYKFIKPILEKMDGTEELLVKLNREDLLRKQ
RTFDNGSIPHQIHLGELHAILRRQEDFYPFLKDNREKIEKILTFRIPYYVGPLARGNSRFAWMTRKSEETITP
WNFEEVVDKFASAQSFIERMTNFDKNLPNEKVLPKHSLLYEFTVYNELTKVKYVTEGMRKPAFLSGEQ
KKAIVDLLFKTNRKVTVKQLKEDYFKKIECFSDVEISGVEDRFNASLGTYHDLLKIIKDKDFLDNEENEDILE
DIVLTLTLFEDREMIEERLKTYAHLFDDKVMKQLKRRRYTGWGRLSRKLINGIRDKQSGKTILDFLKSDGFA
NRNFMQLIHDDSLTFKEDIQKAQVSGQGDSLHEHIANLAGSPAIKKGILQTVKVVDELVKMGRHKPENIVI
EMARENQTTQKGQKNSRERMKRIEEGIKELGSQILKEHPVENTQLQNEKLYLYYLQNGRDMYVDQELDI
NRLSDYDVDAIVPQSFLKDDSIDNKVLTRSDKNRGKSDNVPSEEVVKKMKNYWRQLLNAKLITQRKFDNL
TKAERGGLSELDKAGFIKRQLVETRQITKHVAQILDSRMNTKYDENDKLIREVKVITLKSKLVSDFRKDFQF
YKVREINNYHHAHDAYLNAVVGTALIKKYPKLESEFVYGDYKVYDVRKMIAKSEQEIGKATAKYFFYSNIM
NFFKTEITLANGEIRKRPLIETNGETGEIVWDKGRDFATVRKVLSMPQVINVKKTEVQTGGFSKESILPKRN
SDKLIARKKDWDPKKYGGFDSPTVAYSVLVVAKVEKGKSKKLKSVKELLGITIMERSSFEKNPIDFLEAKG
YKEVKKDLIIKLPKYSLFELENRKRMLASAGELQKGNELALPSKYVNFLYLASHYEKLKGSPEDNEQKQL
FVEQHKHYLDEIIEQISEFSKRVILADANLDKVLSAYNKHRDKPIREQAENIIHLFTLTNLGAPAAFKYFDTTI
DRKRYTSTKEVLDATLIHQSITGLYETRIDLSQLGGDSGGSTNLSDIIEKETGKQLVIQESILMLPEEVEEVIG
DRKRYTSTKEVLDATLIHQSITGLYETRIDLSQLGGDSGGSTNLSDIIEKETGKQLVIQESILMLPEEVEEVIG
NKPEDSILVHTAYDESTDENVMLLTSDAPEYKPWALVIQDSNGENKIKMLSGGSPKKKRKV
BE3 (rAPOBEC1-XTEN-Cas9n-UGI-NLS)
(SEQ ID NO: 544)
MSSETGPVAVDPTLRRRIEPHEFEVFFDPRELRKETCLLYEINWGGRHSIWRHTSQNTNKHVEVNFIEKF
TTERYFCPNTRCSITWFLSWSPCGECSRAITEFLSRYPHVTLFIYIARLYHHADPRNRQGLRDLISSGVTIQ
IMTEQESGYCWRNFVNYSPSNEAHWPRYPHLWVRLYVLELYCIILGLPPCLNILRRKQPQLTFFTIALQSC
HYQRLPPHILWATGLKSGSETPGTSESATPESDKKYSIGLAIGTNSVGWAVITDEYKVPSKKFKVLGNTDR
HSIKKNLIGALLFDSGETAEATRLKRTARRRYTRRKNRICYLQEIFSNEMAKVDDSFFHRLEESFLVEEDKK
HERHPIFGNIVDEVAYHEKYPTIYHLRKKLVDSTDKADLRLIYLALAHMIKFRGHFLIEGDLNPDNSDVDKLF
IQLVQTYNQLFEENPINASGVDAKAILSARLSKSRRLENLIAQLPGEKKNGLFGNLIALSLGLTPNFKSNFDL
AEDAKLQLSKDTYDDDLDNLLAQIGDQYADLFLAAKNILSDAILLSDILRVNTEITKAPLSASMIKRYDEHHQ
DLTLLKALVRQQLPEKYKEIFFDQSKNGYAGYIDGGASQEEFYKFIKPILEKMDGTEELLVKLNREDLLRKQ
RTFDNGSIPHQIHLGELHAILRRQEDFYPFLKDNREKIEKILTFRIPYYVGPLARGNSRFAWMTRKSEETITP
WNFEEVVDKFASAQSFIERMTNFDKNLPNEKVLPKHSLLYEFTVYNELTKVKYVTEGMRKPAFLSGEQ
KKAIVDLLFKTNRKVTVKQLKEDYFKKIECFSDVEISGVEDRFNASLGTYHDLLKIIKDKDFLDNEENEDILE
DIVLTLTLFEDREMIEERLKTYAHLFDDKVMKQLKRRRYTGWGRLSRKLINGIRDKQSGKTILDFLKSDGFA
NRNFMQLIHDDSLTFKEDIQKAQVSGQGDSLHEHIANLAGSPAIKKGILQTVKVVDELVKMGRHKPENIVI
EMARENQTTQKGQKNSRERMKRIEEGIKELGSQILKEHPVENTQLQNEKLYLYYLQNGRDMYVDQELDI
NRLSDYDVDAIVPQSFLKDDSIDNKVLTRSDKNRGKSDNVPSEEVVKKMKNYWRQLLNAKLITQRKFDNL
TKAERGGLSELDKAGFIKRQLVETRQITKHVAQILDSRMNTKYDENDKLIREVKVITLKSKLVSDFRKDFQF
YKVREINNYHHAHDAYLNAVVGTALIKKYPKLESEFVYGDYKVYDVRKMIAKSEQEIGKATAKYFFYSNIM
NFFKTEITLANGEIRKRPLIETNGETGEIVWDKGRDFATVRKVLSMPQVINVKKTEVQTGGFSKESILPKRN
SDKLIARKKDWDPKKYGGFDSPTVAYSVLVVAKVEKGKSKKLKSVKELLGITIMERSSFEKNPIDFLEAKG
YKEVKKDLIIKLPKYSLFELENRKRMLASAGELQKGNELALPSKYVNFLYLASHYEKLKGSPEDNEQKQL
FVEQHKHYLDEIIEQISEFSKRVILADANLDKVLSAYNKHRDKPIREQAENIIHLFTLTNLGAPAAFKYFDTTI
DRKRYTSTKEVLDATLIHQSITGLYETRIDLSQLGGDSGGSTNLSDIIEKETGKQLVIQESILMLPEEVEEVIG
DRKRYTSTKEVLDATLIHQSITGLYETRIDLSQLGGDSGGSTNLSDIIEKETGKQLVIQESILMLPEEVEEVIG
NKPEDSILVHTAYDESTDENVMLLTSDAPEYKPWALVIQDSNGENKIKMLSGGSPKKKRKV
pmCDA1-XTEN-dCas9-UGI (bacteria)
(SEQ ID NO: 545)
MTDAEYVRIHEKLDIYTFKKQFFNNKKSVSHRCYVLFELKRRGERRACFWGYAVNKPQSGTERGIHAEIFSIR
KVEEYLRDNPGQFTINWYSSWSPCADCAEKILEWYNQELRGNGHTLKIWACKLYYEKNARNQIGLWNLRDNGV
GLNVMVSEHYQCCRKIFIQSSHNQLNENRWLEKTLKRAEKRRSELSIMIQVKILHTTKSPAVSGSETPGTSES
ATPESDKKYSIGLAIGTNSVGWAVITDEYKVPSKKEKVLGNTDRHSIKKNLIGALLFDSGETAEATRLKRTAR
RRYTRRKNRICYLQEIFSNEMAKVDDSFFHRLEESFLVEEDKKHERHPIFGNIVDEVAYHEKYPTIYHLRKKL
VDSTDKADLRLIYLALAHMIKFRGHFLIEGDLNPDNSDVDKLFIQLVQTYNQLFEENPINASGVDAKAILSAR
LSKSRRLENLIAQLPGEKKNGLFGNLIALSLGLTPNEKSNEDLAEDAKLQLSKDTYDDDLDNLLAQIGDQYAD
LFLAAKNLSDAILLSDILRVNTEITKAPLSASMIKRYDEHHQDLTLLKALVRQQLPEKYKEIFFDQSKNGYAG
YlDGGASQEEFYKFIKPILEKMDGTEELLVKLNREDLLRKQRTFDNGSIPHQIHLGELHAILRRQEDFYPFLK
DNREKIEKILTFRIPYYVGPLARGNSRFAWMTRKSEETITPWNFEEVVDKGASAQSFIERMTNEDKNLPNEKV
LPKHSLLYEYFTVYNELTKVKYVTEGMRKPAELSGEQKKAIVDLLEKTNRKVTVKQLKEDYFKKIECEDSVEI
SGVEDRFNASLGTYHDLLKIIKDKDFLDNEENEDILEDIVLTLTLFEDREMIEERLKTYAHLFDDKVMKQLKR
RRYTGWGRLSRKLINGIRDKQSGKTILDFLKSDGFANRNFMQLIHDDSLTFKEDIQKAQVSGQGDSLHEHIAN
LAGSPAIKKGILQTVKVVDELVKVMGRHKPENIVIEMARENQTTQKGQKNSRERMKRIEEGIKELGSQILKEH
PVENTQLQNEKLYLYYLQNGRDMYVDQELDINRLSDYDVDAIVPQSFLKDDSIDNKVLTRSDKNRGKSDNVPS
EEVVKKMKNYWRQLLNAKLITQRKEDNLTKAERGGLSELDKAGFIKRQLVETRQITKHVAQILDSRMNTKYDE
NDKLIREVKVITLKSKLVSDERKDFQFYKVREINNYHHAHDAYLNAVVGTALIKKYPKLESEFVYGDYKVYDV
RKMIAKSEQEIGKATAKYFFYSNIMNFFKTEITLANGEIRKRPLIETNGETGEIVWDKGRDFATVRKVLSMPQ
VNIVKKTEVQTGGFSKESILPKRNSDKLIARKKDWDPKKYGGFDSPTVAYSVLVVAKVEKGKSKKLKSVKELL
GITIMERSSFEKNPIDFLEAKGYKEVKKDLIIKLPKYSLFELENGRKRMLASAGELQKGNELALPSKYVNFLY
LASHYEKLKGSPEDNEQKQLFVEQHKHYLDEIIEQISEFSKRVILADANLDKVLSAYNKHRDKPIREQAENII
HLFTLTNLGAPAAFKYFDTTIDRKRYTSTKEVLDATLIHQSITGLYETRIDLSQLGGDSGGSMTNLSDIIEKE
TGKQLVIQESILMLPEEVEEVIGNKPESDILVHTAYDESTDENVMLLTSDAPEYKPWALVIQDSNGENKIKML
pmCDA1-XTEN-nCas9-UGI-NLS (mammalian construct)
(SEQ ID NO: 546)
MTDAEYVRIHEKLDIYTFKKQFFNNKKSVSHRCYVLFELKRRGERRACFWGYAVNKPQSGTERGIHAEIFSIR
KVEEYLRDNPGQFTINWYSSWSPCADCAEKILEWYNQELRGNGHTLKIWACKLYYEKNARNQIGLWNLRDNGV
GLNVMVSEHYQCCRKIFIQSSHNQLNENRWLEKTLKRAEKRRSELSIMIQVKILHTTKSPAVSGSETPGTSES
ATPESDKKYSIGLAIGTNSVGWAVITDEYKVPSKKEKVLGNTDRHSIKKNLIGALLFDSGETAEATRLKRTAR
RRYTRRKNRICYLQEIFSNEMAKVDDSFFHRLEESFLVEEDKKHERHPIFGNIVDEVAYHEKYPTIYHLRKKL
VDSTDKADLRLIYLALAHMIKFRGHFLIEGDLNPDNSDVDKLFIQLVQTYNQLFEENPINASGVDAKAILSAR
LSKSRRLENLIAQLPGEKKNGLFGNLIALSLGLTPNEKSNEDLAEDAKLQLSKDTYDDDLDNLLAQIGDQYAD
LFLAAKNLSDAILLSDILRVNTEITKAPLSASMIKRYDEHHQDLTLLKALVRQQLPEKYKEIFFDQSKNGYAG
YIDGGASQEEFYKFIKPILEKMDGTEELLVKLNREDLLRKQRTFDNGSIPHQIHLGELHAILRRQEDFYPFLK
DNREKIEKILTFRIPYYVGPLARGNSRFAWMTRKSEETITPWNFEEVVDKGASAQSFIERMTNEDKNLPNEKV
LPKHSLLYEYFTVYNELTKVKYVTEGMRKPAELSGEQKKAIVDLLEKTNRKVTVKQLKEDYFKKIECEDSVEI
SGVEDRFNASLGTYHDLLKIIKDKDFLDNEENEDILEDIVLTLTLFEDREMIEERLKTYAHLFDDKVMKQLKR
RRYTGWGRLSRKLINGIRDKQSGKTILDFLKSDGFANRNFMQLIHDDSLTFKEDIQKAQVSGQGDSLHEHIAN
LAGSPAIKKGILQTVKVVDELVKVMGRHKPENIVIEMARENQTTQKGQKNSRERMKRIEEGIKELGSQILKEH
PVENTQLQNEKLYLYYLQNGRDMYVDQELDINRLSDYDVDHIVPQSFLKDDSIDNKVLTRSDKNRGKSDNVPS
EEVVKKMKNYWRQLLNAKLITQRKEDNLTKAERGGLSELDKAGFIKRQLVETRQITKHVAQILDSRMNTKYDE
NDKLIREVKVITLKSKLVSDERKDFQFYKVREINNYHHAHDAYLNAVVGTALIKKYPKLESEFVYGDYKVYDV
RKMIAKSEQEIGKATAKYFFYSNIMNFFKTEITLANGEIRKRPLIETNGETGEIVWDKGRDFATVRKVLSMPQ
VNIVKKTEVQTGGFSKESILPKRNSDKLIARKKDWDPKKYGGFDSPTVAYSVLVVAKVEKGKSKKLKSVKELL
GITIMERSSFEKNPIDFLEAKGYKEVKKDLIIKLPKYSLFELENGRKRMLASAGELQKGNELALPSKYVNFLY
LASHYEKLKGSPEDNEQKQLFVEQHKHYLDEIIEQISEFSKRVILADANLDKVLSAYNKHRDKPIREQAENII
HLFTLTNLGAPAAFKYFDTTIDRKRYTSTKEVLDATLIHQSITGLYETRIDLSQLGGDSGGSTNLSDIIEKET
GKQLVIQESILMLPEEVEEVIGNKPESDILVHTAYDESTDENVMLLTSDAPEYKPWALVIQDSNGENKIKMLS
GGSPKKKRKV
huAPOBEC3G-XTEN-dCas9-UGI (bacteria)
(SEQ ID NO: 547)
MDPPTFTFNENNEPWVRGRHETYLCYEVERMHNDTWVLLNQRRGELCNQAPHKHGELEGRHAELCFLDVIPFW
KLDLDQDYRVICETSWSPCFSCAQEMAKFISKNKHVSLCIFTARIYDDQGRCQEGLRTLAEAGAKISIMTYSE
FKHCWDTFVDHQGCPFQPWDGLDEHSQDLSGRLRAILQSGSETPGTSESATPESDKKYSIGLAIGTNSVGWAV
ITDEYKVPSKKEKVLGNTDRHSIKKNLIGALLFDSGETAEATRLKRTARRRYTRRKNRICYLQEIFSNEMAKV
DDSFFHRLEESFLVEEDKKHERHPIFGNIVDEVAYHEKYPTIYHLRKKLVDSTDKADLRLIYLALAHMIKFRG
HFLIEGDLNPDNSDVDKLFIQLVQTYNQLFEENPINASGVDAKAILSARLSKSRRLENLIAQLPGEKKNGLFG
NLIALSLGLIPNEKSNEDLAEDAKLQLSKDTYDDDLDNLLAQIGDQYADLFLAAKNLSDAILLSDILRVNTEI
TKAPLSASMIKRYDEHHQDLTLLKALVRQQLPEKYKEIFFDQSKNGYAGYIDGGASQEEFYKFIKPILEKMDG
TEELLVKLNREDLLRKQRTFDNGSIPHQIHLGELHAILRRQEDFYPFLKDNREKIEKILTFRIPYYVGPLARG
NSRFAWMTRKSEETITPWNFEEVVDKGASAQSFIERMTNEDKNLPNEKVLPKHSLLYEYFTVYNELTKVKYVT
EGMRKPAELSGEQKKAIVDLLEKTNRKVTVKQLKEDYFKKIECEDSVEISGVEDRFNASLGTYHDLLKIIKDK
DELDNEENEDILEDIVLILTLFEDREMIEERLKTYAHLFDDKVMKQLKRRRYTGWGRLSRKLINGIRDKQSGK
TILDFLKSDGFANRNFMQLIHDDSLTFKEDIQKAQVSGQGDSLHEHIANLAGSPAIKKGILQTVKVVDELVKV
MGRHKPENIVIEMARENQTTQKGQKNSRERMKRIEEGIKELGSQILKEHPVENTQLQNEKLYLYYLQNGRDMY
VDQELDINRLSDYDVDAIVPQSFLKDDSIDNKVLTRSDKNRGKSDNVPSEEVVKKMKNYWRQLLNAKLITQRK
FDNLTKAERGGLSELDKAGFIKRQLVETRQITKHVAQILDSRMNTKYDENDKLIREVKVITLKSKLVSDFRKD
FQFYKVREINNYHHAHDAYLNAVVGTALIKKYPKLESEFVYGDYKVYDVRKMIAKSEQEIGKATAKYFFYSNI
MNFEKTEITLANGEIRKRPLIETNGETGEIVWDKGRDFATVRKVLSMPQVNIVKKTEVQTGGFSKESILPKRN
SDKLIARKKDWDPKKYGGFDSPTVAYSVLVVAKVEKGKSKKLKSVKELLGITIMERSSFEKNPIDFLEAKGYK
EVKKDLIIKLPKYSLFELENGRKRMLASAGELQKGNELALPSKYVNFLYLASHYEKLKGSPEDNEQKQLFVEQ
HKHYLDEIIEQISEFSKRVILADANLDKVLSAYNKHRDKPIREQAENIIHLFTLTNLGAPAAFKYFDTTIDRK
RYTSTKEVLDATLIHQSITGLYETRIDLSQLGGDSGGSMTNLSDIIEKETGKQLVIQESILMLPEEVEEVIGN
KPESDILVHTAYDESTDENVMLLTSDAPEYKPWALVIQDSNGENKIKML
huAPOBEC3G-XTEN-nCas9-UGI-NLS (mammalian construct)
(SEQ ID NO: 548)
MDPPTFTFNENNEPWVRGRHETYLCYEVERMHNDTWVLLNQRRGELCNQAPHKHGELEGRHAELCFLDVIPFW
KLDLDQDYRVICETSWSPCFSCAQEMAKFISKNKHVSLCIFTARIYDDQGRCQEGLRTLAEAGAKISIMTYSE
FKHCWDTFVDHQGCPFQPWDGLDEHSQDLSGRLRAILQSGSETPGTSESATPESDKKYSIGLAIGTNSVGWAV
ITDEYKVPSKKEKVLGNTDRHSIKKNLIGALLFDSGETAEATRLKRTARRRYTRRKNRICYLQEIFSNEMAKV
DDSFFHRLEESFLVEEDKKHERHPIFGNIVDEVAYHEKYPTIYHLRKKLVDSTDKADLRLIYLALAHMIKFRG
HFLIEGDLNPDNSDVDKLFIQLVQTYNQLFEENPINASGVDAKAILSARLSKSRRLENLIAQLPGEKKNGLFG
NLIALSLGLIPNEKSNEDLAEDAKLQLSKDTYDDDLDNLLAQIGDQYADLFLAAKNLSDAILLSDILRVNTEI
TKAPLSASMIKRYDEHHQDLTLLKALVRQQLPEKYKEIFFDQSKNGYAGYIDGGASQEEFYKFIKPILEKMDG
TEELLVKLNREDLLRKQRTFDNGSIPHQIHLGELHAILRRQEDFYPFLKDNREKIEKILTFRIPYYVGPLARG
NSRFAWMTRKSEETITPWNFEEVVDKGASAQSFIERMTNEDKNLPNEKVLPKHSLLYEYFTVYNELTKVKYVT
EGMRKPAELSGEQKKAIVDLLEKTNRKVTVKQLKEDYFKKIECEDSVEISGVEDRFNASLGTYHDLLKIIKDK
DELDNEENEDILEDIVLILTLFEDREMIEERLKTYAHLFDDKVMKQLKRRRYTGWGRLSRKLINGIRDKQSGK
TILDFLKSDGFANRNFMQLIHDDSLTFKEDIQKAQVSGQGDSLHEHIANLAGSPAIKKGILQTVKVVDELVKV
MGRHKPENIVIEMARENQTTQKGQKNSRERMKRIEEGIKELGSQILKEHPVENTQLQNEKLYLYYLQNGRDMY
VDQELDINRLSDYDVDHIVPQSFLKDDSIDNKVLTRSDKNRGKSDNVPSEEVVKKMKNYWRQLLNAKLITQRK
FDNLTKAERGGLSELDKAGFIKRQLVETRQITKHVAQILDSRMNTKYDENDKLIREVKVITLKSKLVSDFRKD
FQFYKVREINNYHHAHDAYLNAVVGTALIKKYPKLESEFVYGDYKVYDVRKMIAKSEQEIGKATAKYFFYSNI
MNFEKTEITLANGEIRKRPLIETNGETGEIVWDKGRDFATVRKVLSMPQVNIVKKTEVQTGGFSKESILPKRN
SDKLIARKKDWDPKKYGGFDSPTVAYSVLVVAKVEKGKSKKLKSVKELLGITIMERSSFEKNPIDFLEAKGYK
EVKKDLIIKLPKYSLFELENGRKRMLASAGELQKGNELALPSKYVNFLYLASHYEKLKGSPEDNEQKQLFVEQ
HKHYLDEIIEQISEFSKRVILADANLDKVLSAYNKHRDKPIREQAENIIHLFTLTNLGAPAAFKYFDTTIDRK
RYTSTKEVLDATLIHQSITGLYETRIDLSQLGGDSGGSTNLSDIIEKETGKQLVIQESILMLPEEVEEVIGNK
PESDILVHTAYDESTDENVMLLTSDAPEYKPWALVIQDSNGENKIKMLSGGSPKKKRKV
huAPOBEC3G (D316R_D317R)-XTEN-nCas9-UGI-NLS (mammalian construct)
(SEQ ID NO: 549)
MDPPTFTFNENNEPWVRGRHETYLCYEVERMHNDTWVLLNQRRGELCNQAPHKHGELEGRHAELCFLDVIPFW
KLDLDQDYRVICETSWSPCFSCAQEMAKFISKNKHVSLCIFTARIYRRQGRCQEGLRTLAEAGAKISIMTYSE
FKHCWDTFVDHQGCPFQPWDGLDEHSQDLSGRLRAILQSGSETPGTSESATPESDKKYSIGLAIGTNSVGWAV
ITDEYKVPSKKEKVLGNTDRHSIKKNLIGALLFDSGETAEATRLKRTARRRYTRRKNRICYLQEIFSNEMAKV
DDSFFHRLEESFLVEEDKKHERHPIFGNIVDEVAYHEKYPTIYHLRKKLVDSTDKADLRLIYLALAHMIKFRG
HFLIEGDLNPDNSDVDKLFIQLVQTYNQLFEENPINASGVDAKAILSARLSKSRRLENLIAQLPGEKKNGLFG
NLIALSLGLIPNEKSNEDLAEDAKLQLSKDTYDDDLDNLLAQIGDQYADLFLAAKNLSDAILLSDILRVNTEI
TKAPLSASMIKRYDEHHQDLTLLKALVRQQLPEKYKEIFFDQSKNGYAGYIDGGASQEEFYKFIKPILEKMDG
TEELLVKLNREDLLRKQRTFDNGSIPHQIHLGELHAILRRQEDFYPFLKDNREKIEKILTFRIPYYVGPLARG
NSRFAWMTRKSEETITPWNFEEVVDKGASAQSFIERMTNEDKNLPNEKVLPKHSLLYEYFTVYNELTKVKYVT
EGMRKPAELSGEQKKAIVDLLEKTNRKVTVKQLKEDYFKKIECEDSVEISGVEDRFNASLGTYHDLLKIIKDK
DELDNEENEDILEDIVLILTLFEDREMIEERLKTYAHLFDDKVMKQLKRRRYTGWGRLSRKLINGIRDKQSGK
TILDFLKSDGFANRNFMQLIHDDSLTFKEDIQKAQVSGQGDSLHEHIANLAGSPAIKKGILQTVKVVDELVKV
MGRHKPENIVIEMARENQTTQKGQKNSRERMKRIEEGIKELGSQILKEHPVENTQLQNEKLYLYYLQNGRDMY
VDQELDINRLSDYDVDHIVPQSFLKDDSIDNKVLTRSDKNRGKSDNVPSEEVVKKMKNYWRQLLNAKLITQRK
FDNLTKAERGGLSELDKAGFIKRQLVETRQITKHVAQILDSRMNTKYDENDKLIREVKVITLKSKLVSDFRKD
FQFYKVREINNYHHAHDAYLNAVVGTALIKKYPKLESEFVYGDYKVYDVRKMIAKSEQEIGKATAKYFFYSNI
MNFEKTEITLANGEIRKRPLIETNGETGEIVWDKGRDFATVRKVLSMPQVNIVKKTEVQTGGFSKESILPKRN
SDKLIARKKDWDPKKYGGFDSPTVAYSVLVVAKVEKGKSKKLKSVKELLGITIMERSSFEKNPIDFLEAKGYK
EVKKDLIIKLPKYSLFELENGRKRMLASAGELQKGNELALPSKYVNFLYLASHYEKLKGSPEDNEQKQLFVEQ
HKHYLDEIIEQISEFSKRVILADANLDKVLSAYNKHRDKPIREQAENIIHLFTLTNLGAPAAFKYFDTTIDRK
RYTSTKEVLDATLIHQSITGLYETRIDLSQLGGDSGGSTNLSDIIEKETGKQLVIQESILMLPEEVEEVIGNK
PESDILVHTAYDESTDENVMLLTSDAPEYKPWALVIQDSNGENKIKMLSGGSPKKKRKV

[0404] Some aspects of the disclosure provide fusion proteins comprising a nucleic acid programmable DNA binding protein (napDNAbp) and an adenosine deaminase. In some embodiments, any of the fusion proteins provided herein are base editors. Some aspects of the disclosure provide fusion proteins comprising a Cas9 domain and an adenosine deaminase. The Cas9 domain may be any of the Cas9 domains (e.g., a dCas9 domain or Cas9n domain) provided herein. In some embodiments, any of the Cas9 domains (e.g., a dCas9 domain or Cas9n domain) provided herein may be fused with any of the adenosine deaminases provided herein. In some embodiments, the fusion protein comprises the structure:

NH₂-[adenosine deaminase]-[napDNAbp]-COOH; or

NH₂-[napDNAbp]-[adenosine deaminase]-COOH.

[0405] In some embodiments, the fusion proteins comprising an adenosine deaminase and a napDNAbp (e.g., Cas9 domain) do not include a linker sequence. In some embodiments, a linker is present between the adenosine deaminase domain and the napDNAbp. In some embodiments, the “-” used in the general architecture above indicates the presence of an optional linker. In some embodiments, the adenosine deaminase and the napDNAbp are fused via any of the linkers provided herein. For example, in some embodiments the adenosine deaminase and the napDNAbp are fused via any of the linkers provided below. In some embodiments, the linker comprises the amino acid sequence of any one of SEQ ID NOs: 300-318. In some embodiments, the adenosine deaminase and the napDNAbp are fused via a linker that comprises between 1 and 200 amino acids. In some embodiments, the adenosine deaminase and the napDNAbp are fused via a linker that comprises from 1 to 5, 1 to 10, 1 to 20, 1 to 30, 1 to 40, 1 to 50, 1 to 60, 1 to 80, 1 to 100, 1 to 150, 1 to 200, 5 to 10, 5 to 20, 5 to 30, 5 to 40, 5 to 60, 5 to 80, 5 to 100, 5 to 150, 5 to 200, 10 to 20, 10 to 30, 10 to 40, 10 to 50, 10 to 60, 10 to 80, 10 to 100, 10 to 150, 10 to 200, 20 to 30, 20 to 40, 20 to 50, 20 to 60, 20 to 80, 20 to 100, 20 to 150, 20 to 200, 30 to 40, 30 to 50, 30 to 60, 30 to 80, 30 to 100, 30 to 150, 30 to 200, 40 to 50, 40 to 60, 40 to 80, 40 to 100, 40 to 150, 40 to 200, 50 to 60 50 to 80, 50 to 100, 50 to 150, 50 to 200, 60 to 80, 60 to 100, 60 to 150, 60 to 200, 80 to 100, 80 to 150, 80 to 200, 100 to 150, 100 to 200, or 150 to 200 amino acids in length. In some embodiments, the adenosine deaminase and the napDNAbp are fused via a linker that comprises 3, 4, 16, 24, 32, 64, 100, or 104 amino acids in length. In some embodiments, the adenosine deaminase and the napDNAbp are fused via a linker that comprises the amino acid sequence SGSETPGTSESATPES (SEQ ID NO: 306), SGGSSGGSSGSETPGTSESATPESSGGSSGGS (SEQ ID NO: 308), or GGSGGSPGSPAGSPTSTEEGTSESATPESGPGTSTEPSEGSAPGSPAGSPTSTEEGTSTEPS EGSAPGTSTEPSEGSAPGTSESATPESGPGSEPATSGGSGGS (SEQ ID NO: 314). In some embodiments, the adenosine deaminase and the napDNAbp are fused via a linker comprising the amino acid sequence SGSETPGTSESATPES (SEQ ID NO: 306), which may also be referred to as the XTEN linker. In some embodiments, the linker is 24 amino acids in length. In some embodiments, the linker comprises the amino acid sequence SGGSSGGSSGSETPGTSESATPES (SEQ ID NO: 315). In some embodiments, the linker is 32 amino acids in length. In some embodiments, the linker comprises the amino acid sequence (SGGS)₂-SGSETPGTSESATPES-(SGGS)₂ (SEQ ID NO: 308), which may also be referred to as (SGGS)₂-XTEN-(SGGS)₂. In some embodiments, the linker comprises the amino acid sequence (SGGS)ₙ-SGSETPGTSESATPES-(SGGS)ₙ (SEQ ID NO: 801), wherein n is 0, 1, 2, 3, 4, 5, 6, 7, 8, 9, or 10. In some embodiments, the linker is 40 amino acids in length. In some embodiments, the linker comprises the amino acid sequence SGGSSGGSSGSETPGTSESATPESSGGSSGGSSGGSSGGS (SEQ ID NO: 316). In some embodiments, the linker is 64 amino acids in length. In some embodiments, the linker comprises the amino acid sequence SGGSSGGSSGSETPGTSESATPESSGGSSGGSSGGSSGGSSGSETPGTSESATPESSGGSS GGS (SEQ ID NO: 317). In some embodiments, the linker is 92 amino acids in length. In some embodiments, the linker comprises the amino acid sequence

(SEQ ID NO: 318)
PGSPAGSPTSTEEGTSESATPESGPGTSTEPSEGSAPGSPAGSPTSTEE
GTSTEPSEGSAPGTSTEPSEGSAPGTSESATPESGPGSEPATS.

[0406] In some embodiments, the fusion proteins comprising an adenosine deaminase provided herein further comprise one or more nuclear targeting sequences, for example, a nuclear localization sequence (NLS). In some embodiments, a NLS comprises an amino acid sequence that facilitates the importation of a protein, that comprises an NLS, into the cell nucleus (e.g., by nuclear transport). In some embodiments, any of the fusion proteins provided herein further comprise a nuclear localization sequence (NLS). In some embodiments, the NLS is fused to the N-terminus of the fusion protein. In some embodiments, the NLS is fused to the C-terminus of the fusion protein. In some embodiments, the NLS is fused to the N-terminus of the IBR (e.g., dISN). In some embodiments, the NLS is fused to the C-terminus of the IBR (e.g., dISN). In some embodiments, the NLS is fused to the N-terminus of the napDNAbp. In some embodiments, the NLS is fused to the C-terminus of the napDNAbp. In some embodiments, the NLS is fused to the N-terminus of the adenosine deaminase. In some embodiments, the NLS is fused to the C-terminus of the adenosine deaminase. In some embodiments, the NLS is fused to the fusion protein via one or more linkers. In some embodiments, the NLS is fused to the fusion protein without a linker. In some embodiments, the NLS comprises an amino acid sequence of any one of the NLS sequences provided or referenced herein. In some embodiments, the NLS comprises an amino acid sequence as set forth in SEQ ID NO: 520 or SEQ ID NO: 521. Additional nuclear localization sequences are known in the art and would be apparent to the skilled artisan. For example, NLS sequences are described in Plank et al., PCT/EP2000/011690, the contents of which are incorporated herein by reference for their disclosure of exemplary nuclear localization sequences. In some embodiments, a NLS comprises the amino acid sequence PKKKRKV (SEQ ID NO: 520). In some embodiments, a NLS comprises the amino acid sequence MDSLLMNRRKFLYQFKNVRWAKGRRETYLC (SEQ ID NO: 521).

[0407] In some embodiments, the general architecture of exemplary fusion proteins with an adenosine deaminase and a napDNAbp comprises any one of the following structures, where NLS is a nuclear localization sequence (e.g., any NLS provided herein), NH₂ is the N-terminus of the fusion protein, and COOH is the C-terminus of the fusion protein. Fusion proteins comprising an adenosine deaminase, a napDNAbp, and a NLS:

NH₂-[NLS]-[adenosine deaminase]-[napDNAbp]-COOH;

NH₂-[adenosine deaminase]-[NLS]-[napDNAbp]-COOH;

NH₂-[adenosine deaminase]-[napDNAbp]-[NLS]-COOH;

NH₂-[NLS]-[napDNAbp]-[adenosine deaminase]-COOH;

NH₂-[napDNAbp]-[NLS]-[adenosine deaminase]-COOH; and

NH₂-[napDNAbp]-[adenosine deaminase]-[NLS]-COOH.

[0408] In some embodiments, the fusion proteins comprising an adenosine deaminase domain provided herein do not comprise a linker. In some embodiments, a linker is present between one or more of the domains or proteins (e.g., adenosine deaminase, napDNAbp, and/or NLS). In some embodiments, the “-” used in the general architecture above indicates the presence of an optional linker.

[0409] Some aspects of the disclosure provide fusion proteins that comprise a nucleic acid programmable DNA binding protein (napDNAbp) and at least two adenosine deaminase domains. Without wishing to be bound by any particular theory, dimerization of adenosine deaminases (e.g., in cis or in trans) may improve the ability (e.g., efficiency) of the fusion protein to modify a nucleic acid base, for example to deaminate adenine. In some embodiments, any of the fusion proteins may comprise 2, 3, 4 or 5 adenosine deaminase domains. In some embodiments, any of the fusion proteins provided herein comprise two adenosine deaminases. In some embodiments, any of the fusion proteins provided herein contain only two adenosine deaminases. In some embodiments, the adenosine deaminases are the same. In some embodiments, the adenosine deaminases are any of the adenosine deaminases provided herein. In some embodiments, the adenosine deaminases are different. In some embodiments, the first adenosine deaminase is any of the adenosine deaminases provided herein, and the second adenosine is any of the adenosine deaminases provided herein, but is not identical to the first adenosine deaminase. As one example, the fusion protein may comprise a first adenosine deaminase and a second adenosine deaminase that both comprise the amino acid sequence of SEQ ID NO: 417, which contains a A106V, D108N, D147Y, and E155V mutation from ecTadA (SEQ ID NO: 400). In some embodiments, the fusion protein may comprise a first adenosine deaminase that comprises the amino acid sequence of SEQ ID NO: 452, which contains a H36L, P48S, R51L, L84F, A106V, D108N, H123Y, S146C, D147Y, E155V, I156F, and K157N mutation from SEQ ID NO: 400, and a second adenosine deaminase domain that comprises the amino acid sequence of wild-type ecTadA (SEQ ID NO: 400). In some embodiments, the fusion protein may comprise a first adenosine deaminase that comprises the amino acid sequence of SEQ ID NO: 455, which contains a H36L, P48S, R51L, L84F, A106V, D108N, H123Y, A142N, S146C, D147Y, E155V, I156F, and K157N mutation from SEQ ID NO: 400, and a second adenosine deaminase domain that comprises the amino acid sequence of wild-type ecTadA (SEQ ID NO: 400). In some embodiments, the fusion protein may comprise a first adenosine deaminase that comprises the amino acid sequence of SEQ ID NO: 456, which contains a W23L, H36L, P48A, R51L, L84F, A106V, D108N, H123Y, A142N, S146C, D147Y, E155V, I156F, and K157N mutation from SEQ ID NO: 400, and a second adenosine deaminase domain that comprises the amino acid sequence of wild-type ecTadA (SEQ ID NO: 400). In some embodiments, the fusion protein may comprise a first adenosine deaminase that comprises the amino acid sequence of SEQ ID NO: 457, which contains a W23L, H36L, P48A, R51L, L84F, A106V, D108N, H123Y, A142N, S146C, D147Y, R152P, E155V, I156F, and K157N mutation from SEQ ID NO: 400, and a second adenosine deaminase domain that comprises the amino acid sequence of wild-type ecTadA (SEQ ID NO: 400). In some embodiments, the fusion protein may comprise a first adenosine deaminase that comprises the amino acid sequence of SEQ ID NO: 458, which contains a W23R, H36L, P48A, R51L, L84F, A106V, D108N, H123Y, S146C, D147Y, R152P, E155V, I156F, and K157N mutation from SEQ ID NO: 400, and a second adenosine deaminase domain that comprises the amino acid sequence of wild-type ecTadA (SEQ ID NO: 400). Additional fusion protein constructs comprising two adenosine deaminase domains suitable for use herein are illustrated in Gaudelli N M, et al. (2017) Programmable base editing of A·T to G·C in genomic DNA without DNA cleavage, Nature, 551(23); 464-471; the entire contents of which is incorporated herein by reference.

[0410] In some embodiments, the fusion protein comprises two adenosine deaminases (e.g., a first adenosine deaminase and a second adenosine deaminase). In some embodiments, the fusion protein comprises a first adenosine deaminase and a second adenosine deaminase. In some embodiments, the first adenosine deaminase is N-terminal to the second adenosine deaminase in the fusion protein. In some embodiments, the first adenosine deaminase is C-terminal to the second adenosine deaminase in the fusion protein. In some embodiments, the first adenosine deaminase and the second deaminase are fused directly or via a linker. In some embodiments, the linker is any of the linkers provided herein. In some embodiments, the linker comprises the amino acid sequence of any one of SEQ ID NOs: 300-318. In some embodiments, the linker is 32 amino acids in length. In some embodiments, the linker comprises the amino acid sequence (SGGS)₂—SGSETPGTSESATPES-(SGGS)₂ (SEQ ID NO: 308), which may also be referred to as (SGGS)₂—XTEN-(SGGS)₂. In some embodiments, the linker comprises the amino acid sequence (SGGS)ₙ-SGSETPGTSESATPES-(SGGS)ₙ (SEQ ID NO: 801), wherein n is 0, 1, 2, 3, 4, 5, 6, 7, 8, 9, or 10. In some embodiments, the first adenosine deaminase is the same as the second adenosine deaminase. In some embodiments, the first adenosine deaminase and the second adenosine deaminase are any of the adenosine deaminases described herein. In some embodiments, the first adenosine deaminase and the second adenosine deaminase are different. In some embodiments, the first adenosine deaminase is any of the adenosine deaminases provided herein. In some embodiments, the second adenosine deaminase is any of the adenosine deaminases provided herein but is not identical to the first adenosine deaminase. In some embodiments, the first adenosine deaminase is an ecTadA adenosine deaminase. In some embodiments, the first adenosine deaminase comprises an amino acid sequence that is at least least 60%, at least 65%, at least 70%, at least 75%, at least 80%, at least 85%, at least 90%, at least 95%, at least 96%, at least 97%, at least 98%, at least 99%, or at least 99.5% identical to any one of the amino acid sequences set forth in any one of SEQ ID NOs: 400-458, or to any of the adenosine deaminases provided herein. In some embodiments, the first adenosine deaminase comprises the amino acid sequence of SEQ ID NO: 400. In some embodiments, the second adenosine deaminase comprises an amino acid sequence that is at least 60%, at least 65%, at least 70%, at least 75%, at least 80%, at least 85%, at least 90%, at least 95%, at least 96%, at least 97%, at least 98%, at least 99%, or at least 99.5% identical to any one of the amino acid sequences set forth in any one of SEQ ID NOs: 400-458, or to any of the adenosine deaminases provided herein. In some embodiments, the second adenosine deaminase comprises the amino acid sequence of SEQ ID NO: 400. In some embodiments, the first adenosine deaminase and the second adenosine deaminase of the fusion protein comprise the mutations in ecTadA (SEQ ID NO: 400), or corresponding mutations in another adenosine deaminase, such as the amino acid sequences of any one of SEQ ID NOs: 402-408. In some embodiments, the fusion protein comprises the two adenosine deaminases (e.g., a first adenosine deaminase and a second adenosine deaminase) of any one of SEQ ID NOs: 400-458.

[0411] In some embodiments, the general architecture of exemplary fusion proteins with a first adenosine deaminase, a second adenosine deaminase, and a napDNAbp comprises any one of the following structures, where NLS is a nuclear localization sequence (e.g., any NLS provided herein), NH₂ is the N-terminus of the fusion protein, and COOH is the C-terminus of the fusion protein:
[0412] NH₂-[first adenosine deaminase]-[second adenosine deaminase]-[napDNAbp]-COOH;
[0413] NH₂-[first adenosine deaminase]-[napDNAbp]-[second adenosine deaminase]-COOH;
[0414] NH₂-[napDNAbp]-[first adenosine deaminase]-[second adenosine deaminase]-COOH;
[0415] NH₂-[second adenosine deaminase]-[first adenosine deaminase]-[napDNAbp]-COOH;
[0416] NH₂-[second adenosine deaminase]-[napDNAbp]-[first adenosine deaminase]-COOH;
[0417] NH₂-[napDNAbp]-[second adenosine deaminase]-[first adenosine deaminase]-COOH;

[0418] In some embodiments, the fusion proteins provided herein do not comprise a linker. In some embodiments, a linker is present between one or more of the domains or proteins (e.g., first adenosine deaminase, second adenosine deaminase, and/or napDNAbp). In some embodiments, the “-” used in the general architecture above indicates the presence of an optional linker.

[0419] In some embodiments, a fusion protein comprising a first adenosine deaminase, a second adenosine deaminase, and a napDNAbp further comprise a NLS. Exemplary fusion proteins comprising a first adenosine deaminase, a second adenosine deaminase, a napDNAbp, and an NLS are shown as follows:
[0420] NH₂-[NLS]-[first adenosine deaminase]-[second adenosine deaminase]-[napDNAbp]-COOH;
[0421] NH₂-[first adenosine deaminase]-[NLS]-[second adenosine deaminase]-[napDNAbp]-COOH;
[0422] NH₂-[first adenosine deaminase]-[second adenosine deaminase]-[NLS]-[napDNAbp]-COOH;
[0423] NH₂-[first adenosine deaminase]-[second adenosine deaminase]-[napDNAbp]-[NLS]-COOH;
[0424] NH₂-[NLS]-[first adenosine deaminase]-[napDNAbp]-[second adenosine deaminase]-COOH;
[0425] NH₂-[first adenosine deaminase]-[NLS]-[napDNAbp]-[second adenosine deaminase]-COOH;
[0426] NH₂-[first adenosine deaminase]-[napDNAbp]-[NLS]-[second adenosine deaminase]-COOH;
[0427] NH₂-[first adenosine deaminase]-[napDNAbp]-[second adenosine deaminase]-[NLS]-COOH;
[0428] NH₂-[NLS]-[napDNAbp]-[first adenosine deaminase]-[second adenosine deaminase]-COOH;
[0429] NH₂-[napDNAbp]-[NLS]-[first adenosine deaminase]-[second adenosine deaminase]-COOH;
[0430] NH₂-[napDNAbp]-[first adenosine deaminase]-[NLS]-[second adenosine deaminase]-COOH;
[0431] NH₂-[napDNAbp]-[first adenosine deaminase]-[second adenosine deaminase]-[NLS]-COOH;
[0432] NH₂-[NLS]-[second adenosine deaminase]-[first adenosine deaminase]-[napDNAbp]-COOH;
[0433] NH₂-[second adenosine deaminase]-[NLS]-[first adenosine deaminase]-[napDNAbp]-COOH;
[0434] NH₂-[second adenosine deaminase]-[first adenosine deaminase]-[NLS]-[napDNAbp]-COOH;
[0435] NH₂-[second adenosine deaminase]-[first adenosine deaminase]-[napDNAbp]-[NLS]-COOH;
[0436] NH₂-[NLS]-[second adenosine deaminase]-[napDNAbp]-[first adenosine deaminase]-COOH;
[0437] NH₂-[second adenosine deaminase]-[NLS]-[napDNAbp]-[first adenosine deaminase]-COOH;
[0438] NH₂-[second adenosine deaminase]-[napDNAbp]-[NLS]-[first adenosine deaminase]-COOH;
[0439] NH₂-[second adenosine deaminase]-[napDNAbp]-[first adenosine deaminase]-[NLS]-COOH;
[0440] NH₂-[NLS]-[napDNAbp]-[second adenosine deaminase]-[first adenosine deaminase]-COOH;
[0441] NH₂-[napDNAbp]-[NLS]-[second adenosine deaminase]-[first adenosine deaminase]-COOH;
[0442] NH₂-[napDNAbp]-[second adenosine deaminase]-[NLS]-[first adenosine deaminase]-COOH;
[0443] NH₂-[napDNAbp]-[second adenosine deaminase]-[first adenosine deaminase]-[NLS]-COOH;

[0444] In some embodiments, the fusion proteins provided herein do not comprise a linker. In some embodiments, a linker is present between one or more of the domains or proteins (e.g., first adenosine deaminase, second adenosine deaminase, napDNAbp, and/or NLS). In some embodiments, the “-” used in the general architecture above indicates the presence of an optional linker.

[0445] In some embodiments, the fusion protein comprises a nuclease-inactive Cas9 domain (e.g., a dCas9 domain or a Cas9n domain) and one or more adenosine deaminase domains (e.g., a first adenosine deaminase and a second adenosine deaminase). In some embodiments, a nuclease-inactive Cas9 domain (e.g., a dCas9 domain or a Cas9n domain), comprises an amino acid sequence that is at least 80%, at least 85%, at least 90%, at least 92%, at least 95%, at least 96%, at least 97%, at least 98%, at least 99%, or at least 99.5% identical to the amino acid sequence of a Cas9 as provided by any one of SEQ ID NOs: 10-260, and comprises mutations that inactivate the nuclease activity of Cas9. Mutations that render the nuclease domains of Cas9 inactive are well-known in the art. For example, the DNA cleavage domain of Cas9 is known to include two subdomains, the HNH nuclease subdomain and the RuvC1 subdomain. The HNH subdomain cleaves the strand complementary to the gRNA, whereas the RuvC1 subdomain cleaves the non-complementary strand. Mutations within these subdomains can silence the nuclease activity of Cas9. For example, the mutations D10A and H840A completely inactivate the nuclease activity of S. pyogenes Cas9 (Jinek et al., Science. 337:816-821(2012); Qi et al., Cell. 28; 152(5):1173-83 (2013)). In some embodiments, the nuclease inactive Cas9 domain is a dCas9 domain. In some embodiments, the nuclease inactive Cas9 domain is a Cas9n domain. In some embodiments, the nuclease inactive Cas9 domain of this disclosure comprises a D10A mutation of the amino acid sequence provided in SEQ ID NO: 10, or a corresponding mutation in any of the amino acid sequences provided in SEQ ID NOs: 11-260. In some embodiments, the nuclease inactive Cas9 domain of this disclosure comprises a H840A mutation of the amino acid sequence provided in SEQ ID NO: 10, or a corresponding mutation in any of the amino acid sequences provided in SEQ ID NOs: 11-260. In some embodiments, the nuclease inactive Cas9 domain of this disclosure comprises both D10A and H840A mutations of the amino acid sequence provided in SEQ ID NO: 10, or a corresponding mutation in any of the amino acid sequences provided in SEQ ID NOs: 11-260. In some embodiments, the nuclease inactive Cas9 domain comprises an amino acid sequence of SEQ ID NO: 6. In some embodiments, the nuclease inactive Cas9 domain further comprises a histidine residue at position 840 of the amino acid sequence provided in SEQ ID NO: 10, or a corresponding mutation in any of the amino acid sequences provided in SEQ ID NOs: 11-260. For example, the presence of the catalytic residue H840 restores the activity of the dCas9 domain to cleave the non-edited strand (i.e., the Cas9 domain is a Cas9 nickase domain) containing, for example, a G opposite the targeted C. Restoration of H840 does not result in the cleavage of the target strand containing the C. In some embodiments, the nuclease inactive Cas9 comprises an amino acid sequence of SEQ ID NO: 7. It is to be understood that other mutations that inactivate the nuclease domains of Cas9 may also be included in the nuclease inactive Cas9 domain (e.g., dCas9 domain, Cas9n domain) of this disclosure.

[0446] In some embodiments, the fusion protein comprises a nuclease-inactive Cas9 domain fused to one or more adenosine deaminase domains (e.g., a first adenosine deaminase and a second adenosine deaminase), wherein the fusion protein comprises or consists of the amino acid sequence of any one of SEQ ID NOs: 560-586. In some embodiments, the fusion protein comprises or consists of the amino acid sequence of SEQ ID NO: 586.

ecTadA(wt)-XTEN-nCas9-NLS:
(SEQ ID NO: 560)
MSEVEFSHEYWMRHALTLAKRAWDEREVPVGAVLVHNNRVIGEGWNRPIGRHDPTAHAEIMALRQGGLVMQNYR
LIDATLYVTLEPCVMCAGAMIHSRIGRVVFGARDAKTGAAGSLMDVLHHPGMNHRVEITEGILADECAALLSDF
FRMRRQEIKAQKKAQSSTDSGSETPGTSESATPESDKKYSIGLAIGTNSVGWAVITDEYKVPSKKEKVLGNTDR
HSIKKNLIGALLFDSGETAEATRLKRTARRRYTRRKNRICYLQEIFSNEMAKVDDSFFHRLEESFLVEEDKKHE
RHPIFGNIVDEVAYHEKYPTIYHLRKKLVDSTDKADLRLIYLALAHMIKFRGHFLIEGDLNPDNSDVDKLFIQL
VQTYNQLFEENPINASGVDAKAILSARLSKSRRLENLIAQLPGEKKNGLFGNLIALSLGLTPNEKSNEDLAEDA
KLQLSKDTYDDDLDNLLAQIGDQYADLFLAAKNLSDAILLSDILRVNTEITKAPLSASMIKRYDEHHQDLTLLK
ALVRQQLPEKYKEIFFDQSKNGYAGYIDGGASQEEFYKFIKPILEKMDGTEELLVKLNREDLLRKQRTFDNGSI
PHQIHLGELHAILRRQEDFYPFLKDNREKIEKILTFRIPYYVGPLARGNSRFAWMTRKSEETITPWNFEEVVDK
GASAQSFIERMTNEDKNLPNEKVLPKHSLLYEYFTVYNELTKVKYVTEGMRKPAELSGEQKKAIVDLLEKTNRK
VTVKQLKEDYFKKIECEDSVEISGVEDRFNASLGTYHDLLKIIKDKDFLDNEENEDILEDIVLTLTLFEDREMI
EERLKTYAHLFDDKVMKQLKRRRYTGWGRLSRKLINGIRDKQSGKTILDFLKSDGFANRNFMQLIHDDSLTFKE
DIQKAQVSGQGDSLHEHIANLAGSPAIKKGILQTVKVVDELVKVMGRHKPENIVIEMARENQTTQKGQKNSRER
MKRIEEGIKELGSQILKEHPVENTQLQNEKLYLYYLQNGRDMYVDQELDINRLSDYDVDHIVPQSFLKDDSIDN
KVLTRSDKNRGKSDNVPSEEVVKKMKNYWRQLLNAKLITQRKEDNLTKAERGGLSELDKAGFIKRQLVETRQIT
KHVAQILDSRMNTKYDENDKLIREVKVITLKSKLVSDERKDFQFYKVREINNYHHAHDAYLNAVVGTALIKKYP
KLESEFVYGDYKVYDVRKMIAKSEQEIGKATAKYFFYSNIMNFFKTEITLANGEIRKRPLIETNGETGEIVWDK
GRDFATVRKVLSMPQVNIVKKTEVQTGGFSKESILPKRNSDKLIARKKDWDPKKYGGFDSPTVAYSVLVVAKVE
KGKSKKLKSVKELLGITIMERSSFEKNPIDFLEAKGYKEVKKDLIIKLPKYSLFELENGRKRMLASAGELQKGN
ELALPSKYVNFLYLASHYEKLKGSPEDNEQKQLFVEQHKHYLDEIIEQISEFSKRVILADANLDKVLSAYNKHR
DKPIREQAENIIHLFTLTNLGAPAAFKYFDTTIDRKRYTSTKEVLDATLIHQSITGLYETRIDLSQLGGDSGGS
PKKKRKV
ecTadA(D108N)-XTEN-nCas9-NLS: (mammalian construct, active on DNA, A to G
editing):
(SEQ ID NO: 561)
MSEVEFSHEYWMRHALTLAKRAWDEREVPVGAVLVHNNRVIGEGWNRPIGRHDPTAHAEIMALRQGGLVMQNYR
LIDATLYVTLEPCVMCAGAMIHSRIGRVVFGARNAKTGAAGSLMDVLHHPGMNHRVEITEGILADECAALLSDF
FRMRRQEIKAQKKAQSSTDSGSETPGTSESATPESDKKYSIGLAIGTNSVGWAVITDEYKVPSKKEKVLGNTDR
HSIKKNLIGALLFDSGETAEATRLKRTARRRYTRRKNRICYLQEIFSNEMAKVDDSFFHRLEESFLVEEDKKHE
RHPIFGNIVDEVAYHEKYPTIYHLRKKLVDSTDKADLRLIYLALAHMIKFRGHFLIEGDLNPDNSDVDKLFIQL
VQTYNQLFEENPINASGVDAKAILSARLSKSRRLENLIAQLPGEKKNGLFGNLIALSLGLTPNEKSNEDLAEDA
KLQLSKDTYDDDLDNLLAQIGDQYADLFLAAKNLSDAILLSDILRVNTEITKAPLSASMIKRYDEHHQDLTLLK
ALVRQQLPEKYKEIFFDQSKNGYAGYIDGGASQEEFYKFIKPILEKMDGTEELLVKLNREDLLRKQRTFDNGSI
PHQIHLGELHAILRRQEDFYPFLKDNREKIEKILTFRIPYYVGPLARGNSRFAWMTRKSEETITPWNFEEVVDK
GASAQSFIERMTNEDKNLPNEKVLPKHSLLYEYFTVYNELTKVKYVTEGMRKPAELSGEQKKAIVDLLEKTNRK
VTVKQLKEDYFKKIECEDSVEISGVEDRFNASLGTYHDLLKIIKDKDFLDNEENEDILEDIVLTLTLFEDREMI
EERLKTYAHLFDDKVMKQLKRRRYTGWGRLSRKLINGIRDKQSGKTILDFLKSDGFANRNFMQLIHDDSLTFKE
DIQKAQVSGQGDSLHEHIANLAGSPAIKKGILQTVKVVDELVKVMGRHKPENIVIEMARENQTTQKGQKNSRER
MKRIEEGIKELGSQILKEHPVENTQLQNEKLYLYYLQNGRDMYVDQELDINRLSDYDVDHIVPQSFLKDDSIDN
KVLTRSDKNRGKSDNVPSEEVVKKMKNYWRQLLNAKLITQRKEDNLTKAERGGLSELDKAGFIKRQLVETRQIT
KHVAQILDSRMNTKYDENDKLIREVKVITLKSKLVSDERKDFQFYKVREINNYHHAHDAYLNAVVGTALIKKYP
KLESEFVYGDYKVYDVRKMIAKSEQEIGKATAKYFFYSNIMNFFKTEITLANGEIRKRPLIETNGETGEIVWDK
GRDFATVRKVLSMPQVNIVKKTEVQTGGFSKESILPKRNSDKLIARKKDWDPKKYGGFDSPTVAYSVLVVAKVE
KGKSKKLKSVKELLGITIMERSSFEKNPIDFLEAKGYKEVKKDLIIKLPKYSLFELENGRKRMLASAGELQKGN
ELALPSKYVNFLYLASHYEKLKGSPEDNEQKQLFVEQHKHYLDEIIEQISEFSKRVILADANLDKVLSAYNKHR
DKPIREQAENIIHLFTLTNLGAPAAFKYFDTTIDRKRYTSTKEVLDATLIHQSITGLYETRIDLSQLGGDSGGS
PKKKRKV
ecTadA(D108G)-XTEN-nCas9-NLS: (mammalian construct, active on DNA, A to G
editing):
(SEQ ID NO: 562)
MSEVEFSHEYWMRHALTLAKRAWDEREVPVGAVLVHNNRVIGEGWNRPIGRHDPTAHAEIMALRQGGLVMQNYR
LIDATLYVTLEPCVMCAGAMIHSRIGRVVFGARGAKTGAAGSLMDVLHHPGMNHRVEITEGILADECAALLSDF
FRMRRQEIKAQKKAQSSTDSGSETPGTSESATPESDKKYSIGLAIGTNSVGWAVITDEYKVPSKKEKVLGNTDR
HSIKKNLIGALLFDSGETAEATRLKRTARRRYTRRKNRICYLQEIFSNEMAKVDDSFFHRLEESFLVEEDKKHE
RHPIFGNIVDEVAYHEKYPTIYHLRKKLVDSTDKADLRLIYLALAHMIKFRGHFLIEGDLNPDNSDVDKLFIQL
VQTYNQLFEENPINASGVDAKAILSARLSKSRRLENLIAQLPGEKKNGLFGNLIALSLGLTPNEKSNEDLAEDA
KLQLSKDTYDDDLDNLLAQIGDQYADLFLAAKNLSDAILLSDILRVNTEITKAPLSASMIKRYDEHHQDLTLLK
ALVRQQLPEKYKEIFFDQSKNGYAGYIDGGASQEEFYKFIKPILEKMDGTEELLVKLNREDLLRKQRTFDNGSI
PHQIHLGELHAILRRQEDFYPFLKDNREKIEKILTFRIPYYVGPLARGNSRFAWMTRKSEETITPWNFEEVVDK
GASAQSFIERMTNEDKNLPNEKVLPKHSLLYEYFTVYNELTKVKYVTEGMRKPAELSGEQKKAIVDLLEKTNRK
VTVKQLKEDYFKKIECEDSVEISGVEDRFNASLGTYHDLLKIIKDKDFLDNEENEDILEDIVLTLTLFEDREMI
EERLKTYAHLFDDKVMKQLKRRRYTGWGRLSRKLINGIRDKQSGKTILDFLKSDGFANRNFMQLIHDDSLTFKE
DIQKAQVSGQGDSLHEHIANLAGSPAIKKGILQTVKVVDELVKVMGRHKPENIVIEMARENQTTQKGQKNSRER
MKRIEEGIKELGSQILKEHPVENTQLQNEKLYLYYLQNGRDMYVDQELDINRLSDYDVDHIVPQSFLKDDSIDN
KVLTRSDKNRGKSDNVPSEEVVKKMKNYWRQLLNAKLITQRKEDNLTKAERGGLSELDKAGFIKRQLVETRQIT
KHVAQILDSRMNTKYDENDKLIREVKVITLKSKLVSDERKDFQFYKVREINNYHHAHDAYLNAVVGTALIKKYP
KLESEFVYGDYKVYDVRKMIAKSEQEIGKATAKYFFYSNIMNFFKTEITLANGEIRKRPLIETNGETGEIVWDK
GRDFATVRKVLSMPQVNIVKKTEVQTGGFSKESILPKRNSDKLIARKKDWDPKKYGGFDSPTVAYSVLVVAKVE
KGKSKKLKSVKELLGITIMERSSFEKNPIDFLEAKGYKEVKKDLIIKLPKYSLFELENGRKRMLASAGELQKGN
ELALPSKYVNFLYLASHYEKLKGSPEDNEQKQLFVEQHKHYLDEIIEQISEFSKRVILADANLDKVLSAYNKHR
DKPIREQAENIIHLFTLTNLGAPAAFKYFDTTIDRKRYTSTKEVLDATLIHQSITGLYETRIDLSQLGGDSGGS
PKKKRKV
ecTadA(D108V)-XTEN-nCas9-NLS: (mammalian construct, active on DNA, A to G
editing):
(SEQ ID NO: 563)
MSEVEFSHEYWMRHALTLAKRAWDEREVPVGAVLVHNNRVIGEGWNRPIGRHDPTAHAEIMALRQGGLVMQNYR
LIDATLYVTLEPCVMCAGAMIHSRIGRVVFGARVAKTGAAGSLMDVLHHPGMNHRVEITEGILADECAALLSDF
FRMRRQEIKAQKKAQSSTDSGSETPGTSESATPESDKKYSIGLAIGTNSVGWAVITDEYKVPSKKEKVLGNTDR
HSIKKNLIGALLFDSGETAEATRLKRTARRRYTRRKNRICYLQEIFSNEMAKVDDSFFHRLEESFLVEEDKKHE
RHPIFGNIVDEVAYHEKYPTIYHLRKKLVDSTDKADLRLIYLALAHMIKFRGHFLIEGDLNPDNSDVDKLFIQL
VQTYNQLFEENPINASGVDAKAILSARLSKSRRLENLIAQLPGEKKNGLFGNLIALSLGLTPNEKSNEDLAEDA
KLQLSKDTYDDDLDNLLAQIGDQYADLFLAAKNLSDAILLSDILRVNTEITKAPLSASMIKRYDEHHQDLTLLK
ALVRQQLPEKYKEIFFDQSKNGYAGYIDGGASQEEFYKFIKPILEKMDGTEELLVKLNREDLLRKQRTFDNGSI
PHQIHLGELHAILRRQEDFYPFLKDNREKIEKILTFRIPYYVGPLARGNSRFAWMTRKSEETITPWNFEEVVDK
GASAQSFIERMTNEDKNLPNEKVLPKHSLLYEYFTVYNELTKVKYVTEGMRKPAELSGEQKKAIVDLLEKTNRK
VTVKQLKEDYFKKIECEDSVEISGVEDRFNASLGTYHDLLKIIKDKDFLDNEENEDILEDIVLTLTLFEDREMI
EERLKTYAHLFDDKVMKQLKRRRYTGWGRLSRKLINGIRDKQSGKTILDFLKSDGFANRNFMQLIHDDSLTFKE
DIQKAQVSGQGDSLHEHIANLAGSPAIKKGILQTVKVVDELVKVMGRHKPENIVIEMARENQTTQKGQKNSRER
MKRIEEGIKELGSQILKEHPVENTQLQNEKLYLYYLQNGRDMYVDQELDINRLSDYDVDHIVPQSFLKDDSIDN
KVLTRSDKNRGKSDNVPSEEVVKKMKNYWRQLLNAKLITQRKEDNLTKAERGGLSELDKAGFIKRQLVETRQIT
KHVAQILDSRMNTKYDENDKLIREVKVITLKSKLVSDERKDFQFYKVREINNYHHAHDAYLNAVVGTALIKKYP
KLESEFVYGDYKVYDVRKMIAKSEQEIGKATAKYFFYSNIMNFFKTEITLANGEIRKRPLIETNGETGEIVWDK
GRDFATVRKVLSMPQVNIVKKTEVQTGGFSKESILPKRNSDKLIARKKDWDPKKYGGFDSPTVAYSVLVVAKVE
KGKSKKLKSVKELLGITIMERSSFEKNPIDFLEAKGYKEVKKDLIIKLPKYSLFELENGRKRMLASAGELQKGN
ELALPSKYVNFLYLASHYEKLKGSPEDNEQKQLFVEQHKHYLDEIIEQISEFSKRVILADANLDKVLSAYNKHR
DKPIREQAENIIHLFTLTNLGAPAAFKYFDTTIDRKRYTSTKEVLDATLIHQSITGLYETRIDLSQLGGDSGGS
PKKKRKV
ecTadA(H8Y_D108N_N127S)-XTEN-dCas9:
(SEQ ID NO: 564)
MSEVEFSYEYWMRHALTLAKRAWDEREVPVGAVLVHNNRVIGEGWNRPIGRHDPTAHAEIMALRQGGLVMQNYR
LIDATLYVTLEPCVMCAGAMIHSRIGRVVFGARNAKTGAAGSLMDVLHHPGMSHRVEITEGILADECAALLSDF
FRMRRQEIKAQKKAQSSTDSGSETPGTSESATPESDKKYSIGLAIGTNSVGWAVITDEYKVPSKKFKVLGNTDR
HSIKKNLIGALLFDSGETAEATRLKRTARRRYTRRKNRICYLQEIFSNEMAKVDDSFFHRLEESFLVEEDKKHE
RHPIFGNIVDEVAYHEKYPTIYHLRKKLVDSTDKADLRLIYLALAHMIKFRGHFLIEGDLNPDNSDVDKLFIQL
VQTYNQLFEENPINASGVDAKAILSARLSKSRRLENLIAQLPGEKKNGLFGNLIALSLGLTPNFKSNFDLAEDA
KLQLSKDTYDDDLDNLLAQIGDQYADLFLAAKNLSDAILLSDILRVNTEITKAPLSASMIKRYDEHHQDLTLLK
ALVRQQLPEKYKEIFFDQSKNGYAGYIDGGASQEEFYKFIKPILEKMDGTEELLVKLNREDLLRKQRTFDNGSI
PHQIHLGELHAILRRQEDFYPFLKDNREKIEKILTFRIPYYVGPLARGNSRFAWMTRKSEETITPWNFEEVVDK
GASAQSFIERMTNFDKNLPNEKVLPKHSLLYEYFTVYNELTKVKYVTEGMRKPAFLSGEQKKAIVDLLFKTNRK
VTVKQLKEDYFKKIECFDSVEISGVEDRFNASLGTYHDLLKIIKDKDFLDNEENEDILEDIVLTLTLFEDREMI
EERLKTYAHLFDDKVMKQLKRRRYTGWGRLSRKLINGIRDKQSGKTILDFLKSDGFANRNFMQLIHDDSLTFKE
DIQKAQVSGQGDSLHEHIANLAGSPAIKKGILQTVKVVDELVKVMGRHKPENIVIEMARENQTTQKGQKNSRER
MKRIEEGIKELGSQILKEHPVENTQLQNEKLYLYYLQNGRDMYVDQELDINRLSDYDVDAIVPQSFLKDDSIDN
KVLTRSDKNRGKSDNVPSEEVVKKMKNYWRQLLNAKLITQRKFDNLTKAERGGLSELDKAGFIKRQLVETRQIT
KHVAQILDSRMNTKYDENDKLIREVKVITLKSKLVSDFRKDFQFYKVREINNYHHAHDAYLNAVVGTALIKKYP
KLESEFVYGDYKVYDVRKMIAKSEQEIGKATAKYFFYSNIMNFFKTEITLANGEIRKRPLIETNGETGEIVWDK
GRDFATVRKVLSMPQVNIVKKTEVQTGGFSKESILPKRNSDKLIARKKDWDPKKYGGFDSPTVAYSVLVVAKVE
KGKSKKLKSVKELLGITIMERSSFEKNPIDFLEAKGYKEVKKDLIIKLPKYSLFELENGRKRMLASAGELQKGN
ELALPSKYVNFLYLASHYEKLKGSPEDNEQKQLFVEQHKHYLDEIIEQISEFSKRVILADANLDKVLSAYNKHR
DKPIREQAENIIHLFTLTNLGAPAAFKYFDTTIDRKRYTSTKEVLDATLIHQSITGLYETRIDLSQLGGD
ecTadA(H8Y_D108N_N127S_E155X)-XTEN-dCas9; X = D, G or V:
(SEQ ID NO: 565)
MSEVEFSYEYWMRHALTLAKRAWDEREVPVGAVLVHNNRVIGEGWNRPIGRHDPTAHAEIMALRQGGLVMQNYR
LIDATLYVTLEPCVMCAGAMIHSRIGRVVFGARNAKTGAAGSLMDVLHHPGMSHRVEITEGILADECAALLSDF
FRMRRQXIKAQKKAQSSTDSGSETPGTSESATPESDKKYSIGLAIGTNSVGWAVITDEYKVPSKKFKVLGNTDR
HSIKKNLIGALLFDSGETAEATRLKRTARRRYTRRKNRICYLQEIFSNEMAKVDDSFFHRLEESFLVEEDKKHE
RHPIFGNIVDEVAYHEKYPTIYHLRKKLVDSTDKADLRLIYLALAHMIKFRGHFLIEGDLNPDNSDVDKLFIQL
VQTYNQLFEENPINASGVDAKAILSARLSKSRRLENLIAQLPGEKKNGLFGNLIALSLGLTPNFKSNFDLAEDA
KLQLSKDTYDDDLDNLLAQIGDQYADLFLAAKNLSDAILLSDILRVNTEITKAPLSASMIKRYDEHHQDLTLLK
ALVRQQLPEKYKEIFFDQSKNGYAGYIDGGASQEEFYKFIKPILEKMDGTEELLVKLNREDLLRKQRTFDNGSI
PHQIHLGELHAILRRQEDFYPFLKDNREKIEKILTFRIPYYVGPLARGNSRFAWMTRKSEETITPWNFEEVVDK
GASAQSFIERMTNFDKNLPNEKVLPKHSLLYEYFTVYNELTKVKYVTEGMRKPAFLSGEQKKAIVDLLFKTNRK
VTVKQLKEDYFKKIECFDSVEISGVEDRFNASLGTYHDLLKIIKDKDFLDNEENEDILEDIVLTLTLFEDREMI
EERLKTYAHLFDDKVMKQLKRRRYTGWGRLSRKLINGIRDKQSGKTILDFLKSDGFANRNFMQLIHDDSLTFKE
DIQKAQVSGQGDSLHEHIANLAGSPAIKKGILQTVKVVDELVKVMGRHKPENIVIEMARENQTTQKGQKNSRER
MKRIEEGIKELGSQILKEHPVENTQLQNEKLYLYYLQNGRDMYVDQELDINRLSDYDVDAIVPQSFLKDDSIDN
KVLTRSDKNRGKSDNVPSEEVVKKMKNYWRQLLNAKLITQRKFDNLTKAERGGLSELDKAGFIKRQLVETRQIT
KHVAQILDSRMNTKYDENDKLIREVKVITLKSKLVSDFRKDFQFYKVREINNYHHAHDAYLNAVVGTALIKKYP
KLESEFVYGDYKVYDVRKMIAKSEQEIGKATAKYFFYSNIMNFFKTEITLANGEIRKRPLIETNGETGEIVWDK
GRDFATVRKVLSMPQVNIVKKTEVQTGGFSKESILPKRNSDKLIARKKDWDPKKYGGFDSPTVAYSVLVVAKVE
KGKSKKLKSVKELLGITIMERSSFEKNPIDFLEAKGYKEVKKDLIIKLPKYSLFELENGRKRMLASAGELQKGN
ELALPSKYVNFLYLASHYEKLKGSPEDNEQKQLFVEQHKHYLDEIIEQISEFSKRVILADANLDKVLSAYNKHR
DKPIREQAENIIHLFTLTNLGAPAAFKYFDTTIDRKRYTSTKEVLDATLIHQSITGLYETRIDLSQLGGD
ABE7.7: ecTadA_{(wild type)}-(SGGS)₂-XTEN-(SGGS)₂-
ecTadA_{(W23L}_H36L_P48A_R51L_L84F_A106V_D108N_H123Y_S146C_D147Y_R152P_E155V_1156F_K157N)-
(SGGS)₂-XTEN-(SGGS)₂_nCas9_SGGS_NLS
(SEQ ID NO: 566)
MSEVEFSHEYWMRHALTLAKRAWDEREVPVGAVLVHNNRVIGEGWNRPIGRHDPTAHAEIMALRQGGLVMQNYR
LIDATLYVTLEPCVMCAGAMIHSRIGRVVFGARDAKTGAAGSLMDVLHHPGMNHRVEITEGILADECAALLSDF
FRMRRQEIKAQKKAQSSTDSGGSSGGSSGSETPGTSESATPESSGGSSGGSSEVEFSHEYWMRHALTLAKRALD
EREVPVGAVLVLNNRVIGEGWNRAIGLHDPTAHAEIMALRQGGLVMQNYRLIDATLYVTFEPCVMCAGAMIHSR
IGRVVFGVRNAKTGAAGSLMDVLHYPGMNHRVEITEGILADECAALLCYFFRMPRQVFNAQKKAQSSTDSGGSS
GGSSGSETPGTSESATPESSGGSSGGSDKKYSIGLAIGTNSVGWAVITDEYKVPSKKFKVLGNTDRHSIKKNLI
GALLFDSGETAEATRLKRTARRRYTRRKNRICYLQEIFSNEMAKVDDSFFHRLEESFLVEEDKKHERHPIFGNI
VDEVAYHEKYPTIYHLRKKLVDSTDKADLRLIYLALAHMIKFRGHFLIEGDLNPDNSDVDKLFIQLVQTYNQLF
EENPINASGVDAKAILSARLSKSRRLENLIAQLPGEKKNGLFGNLIALSLGLTPNFKSNFDLAEDAKLQLSKDT
YDDDLDNLLAQIGDQYADLFLAAKNLSDAILLSDILRVNTEITKAPLSASMIKRYDEHHQDLTLLKALVRQQLP
EKYKEIFFDQSKNGYAGYIDGGASQEEFYKFIKPILEKMDGTEELLVKLNREDLLRKQRTFDNGSIPHQIHLGE
LHAILRRQEDFYPFLKDNREKIEKILTFRIPYYVGPLARGNSRFAWMTRKSEETITPWNFEEVVDKGASAQSFI
ERMTNFDKNLPNEKVLPKHSLLYEYFTVYNELTKVKYVTEGMRKPAFLSGEQKKAIVDLLFKTNRKVTVKQLKE
DYFKKIECFDSVEISGVEDRFNASLGTYHDLLKIIKDKDFLDNEENEDILEDIVLTLTLFEDREMIEERLKTYA
HLFDDKVMKQLKRRRYTGWGRLSRKLINGIRDKQSGKTILDFLKSDGFANRNFMQLIHDDSLTFKEDIQKAQVS
GQGDSLHEHIANLAGSPAIKKGILQTVKVVDELVKVMGRHKPENIVIEMARENQTTQKGQKNSRERMKRIEEGI
KELGSQILKEHPVENTQLQNEKLYLYYLQNGRDMYVDQELDINRLSDYDVDHIVPQSFLKDDSIDNKVLTRSDK
NRGKSDNVPSEEVVKKMKNYWRQLLNAKLITQRKFDNLTKAERGGLSELDKAGFIKRQLVETRQITKHVAQILD
SRMNTKYDENDKLIREVKVITLKSKLVSDFRKDFQFYKVREINNYHHAHDAYLNAVVGTALIKKYPKLESEFVY
GDYKVYDVRKMIAKSEQEIGKATAKYFFYSNIMNFFKTEITLANGEIRKRPLIETNGETGEIVWDKGRDFATVR
KVLSMPQVNIVKKTEVQTGGFSKESILPKRNSDKLIARKKDWDPKKYGGFDSPTVAYSVLVVAKVEKGKSKKLK
SVKELLGITIMERSSFEKNPIDFLEAKGYKEVKKDLIIKLPKYSLFELENGRKRMLASAGELQKGNELALPSKY
VNFLYLASHYEKLKGSPEDNEQKQLFVEQHKHYLDEIIEQISEFSKRVILADANLDKVLSAYNKHRDKPIREQA
ENIIHLFTLTNLGAPAAFKYFDTTIDRKRYTSTKEVLDATLIHQSITGLYETRIDLSQLGGDSGGSPKKKRKV
pNMG-624 amino acid sequence: ecTadA_{(wild type)}-32 a.a. linker-
ecTadA_{(W23R}_H36L_P48A_R51L_L84F_A106V_D108N_H123Y_S146C_D147Y_R152P_E155V_I156F_K157N)-24 a.a.
linker_nCas9_SGGS_NLS
(SEQ ID NO: 567)
MSEVEFSHEYWMRHALTLAKRAWDEREVPVGAVLVHNNRVIGEGWNRPIGRHDPTAHAEIMALRQGGLVMQNYR
LIDATLYVTLEPCVMCAGAMIHSRIGRVVFGARDAKTGAAGSLMDVLHHPGMNHRVEITEGILADECAALLSDF
FRMRRQEIKAQKKAQSSTDSGGSSGGSSGSETPGTSESATPESSGGSSGGSSEVEFSHEYWMRHALTLAKRARD
EREVPVGAVLVLNNRVIGEGWNRAIGLHDPTAHAEIMALRQGGLVMQNYRLIDATLYVTFEPCVMCAGAMIHSR
IGRVVFGVRNAKTGAAGSLMDVLHYPGMNHRVEITEGILADECAALLCYFFRMPRQVFNAQKKAQSSTDSGGSS
GGSSGSETPGTSESATPESDKKYSIGLAIGTNSVGWAVITDEYKVPSKKFKVLGNTDRHSIKKNLIGALLFDSG
ETAEATRLKRTARRRYTRRKNRICYLQEIFSNEMAKVDDSFFHRLEESFLVEEDKKHERHPIFGNIVDEVAYHE
KYPTIYHLRKKLVDSTDKADLRLIYLALAHMIKFRGHFLIEGDLNPDNSDVDKLFIQLVQTYNQLFEENPINAS
GVDAKAILSARLSKSRRLENLIAQLPGEKKNGLFGNLIALSLGLTPNFKSNFDLAEDAKLQLSKDTYDDDLDNL
LAQIGDQYADLFLAAKNLSDAILLSDILRVNTEITKAPLSASMIKRYDEHHQDLTLLKALVRQQLPEKYKEIFF
DQSKNGYAGYIDGGASQEEFYKFIKPILEKMDGTEELLVKLNREDLLRKQRTFDNGSIPHQIHLGELHAILRRQ
EDFYPFLKDNREKIEKILTFRIPYYVGPLARGNSRFAWMTRKSEETITPWNFEEVVDKGASAQSFIERMTNFDK
NLPNEKVLPKHSLLYEYFTVYNELTKVKYVTEGMRKPAFLSGEQKKAIVDLLFKTNRKVTVKQLKEDYFKKIEC
FDSVEISGVEDRFNASLGTYHDLLKIIKDKDFLDNEENEDILEDIVLTLTLFEDREMIEERLKTYAHLFDDKVM
KQLKRRRYTGWGRLSRKLINGIRDKQSGKTILDFLKSDGFANRNFMQLIHDDSLTFKEDIQKAQVSGQGDSLHE
HIANLAGSPAIKKGILQTVKVVDELVKVMGRHKPENIVIEMARENQTTQKGQKNSRERMKRIEEGIKELGSQIL
KEHPVENTQLQNEKLYLYYLQNGRDMYVDQELDINRLSDYDVDHIVPQSFLKDDSIDNKVLTRSDKNRGKSDNV
PSEEVVKKMKNYWRQLLNAKLITQRKFDNLTKAERGGLSELDKAGFIKRQLVETRQITKHVAQILDSRMNTKYD
ENDKLIREVKVITLKSKLVSDFRKDFQFYKVREINNYHHAHDAYLNAVVGTALIKKYPKLESEFVYGDYKVYDV
RKMIAKSEQEIGKATAKYFFYSNIMNFFKTEITLANGEIRKRPLIETNGETGEIVWDKGRDFATVRKVLSMPQV
NIVKKTEVQTGGFSKESILPKRNSDKLIARKKDWDPKKYGGFDSPTVAYSVLVVAKVEKGKSKKLKSVKELLGI
TIMERSSFEKNPIDFLEAKGYKEVKKDLIIKLPKYSLFELENGRKRMLASAGELQKGNELALPSKYVNFLYLAS
HYEKLKGSPEDNEQKQLFVEQHKHYLDEIIEQISEFSKRVILADANLDKVLSAYNKHRDKPIREQAENIIHLFT
LTNLGAPAAFKYFDTTIDRKRYTSTKEVLDATLIHQSITGLYETRIDLSQLGGDSGGSPKKKRKV
ABE3.2: ecTadA_{(wild-type)}-(SGGS)₂-XTEN-(SGGS)₂-
ecTadA_{(L84F}_A106v_D108N_H123Y_D147Y_E155V_I156F)-(SGGS)₂-XTEN-
(SGGS)₂_nCas9_SGGS_NLS
(SEQ ID NO: 568)
MSEVEFSHEYWMRHALTLAKRAWDEREVPVGAVLVHNNRVIGEGWNRPIGRHDPTAHAEIMALRQGGLVMQNYR
LIDATLYVTLEPCVMCAGAMIHSRIGRVVFGARDAKTGAAGSLMDVLHHPGMNHRVEITEGILADECAALLSDF
FRMRRQEIKAQKKAQSSTDSGGSSGGSSGSETPGTSESATPESSGGSSGGSSEVEFSHEYWMRHALTLAKRAWD
EREVPVGAVLVHNNRVIGEGWNRPIGRHDPTAHAEIMALRQGGLVMQNYRLIDATLYVTFEPCVMCAGAMIHSR
IGRVVFGVRNAKTGAAGSLMDVLHYPGMNHRVEITEGILADECAALLSYFFRMRRQVFKAQKKAQSSTDSGGSS
GGSSGSETPGTSESATPESSGGSSGGSDKKYSIGLAIGTNSVGWAVITDEYKVPSKKFKVLGNTDRHSIKKNLI
GALLFDSGETAEATRLKRTARRRYTRRKNRICYLQEIFSNEMAKVDDSFFHRLEESFLVEEDKKHERHPIFGNI
VDEVAYHEKYPTIYHLRKKLVDSTDKADLRLIYLALAHMIKFRGHFLIEGDLNPDNSDVDKLFIQLVQTYNQLF
EENPINASGVDAKAILSARLSKSRRLENLIAQLPGEKKNGLFGNLIALSLGLTPNFKSNFDLAEDAKLQLSKDT
YDDDLDNLLAQIGDQYADLFLAAKNLSDAILLSDILRVNTEITKAPLSASMIKRYDEHHQDLTLLKALVRQQLP
EKYKEIFFDQSKNGYAGYIDGGASQEEFYKFIKPILEKMDGTEELLVKLNREDLLRKQRTFDNGSIPHQIHLGE
LHAILRRQEDFYPFLKDNREKIEKILTFRIPYYVGPLARGNSRFAWMTRKSEETITPWNFEEVVDKGASAQSFI
ERMTNFDKNLPNEKVLPKHSLLYEYFTVYNELTKVKYVTEGMRKPAFLSGEQKKAIVDLLFKTNRKVTVKQLKE
DYFKKIECFDSVEISGVEDRFNASLGTYHDLLKIIKDKDFLDNEENEDILEDIVLTLTLFEDREMIEERLKTYA
HLFDDKVMKQLKRRRYTGWGRLSRKLINGIRDKQSGKTILDFLKSDGFANRNFMQLIHDDSLTFKEDIQKAQVS
GQGDSLHEHIANLAGSPAIKKGILQTVKVVDELVKVMGRHKPENIVIEMARENQTTQKGQKNSRERMKRIEEGI
KELGSQILKEHPVENTQLQNEKLYLYYLQNGRDMYVDQELDINRLSDYDVDHIVPQSFLKDDSIDNKVLTRSDK
NRGKSDNVPSEEVVKKMKNYWRQLLNAKLITQRKFDNLTKAERGGLSELDKAGFIKRQLVETRQITKHVAQILD
SRMNTKYDENDKLIREVKVITLKSKLVSDFRKDFQFYKVREINNYHHAHDAYLNAVVGTALIKKYPKLESEFVY
GDYKVYDVRKMIAKSEQEIGKATAKYFFYSNIMNFFKTEITLANGEIRKRPLIETNGETGEIVWDKGRDFATVR
KVLSMPQVNIVKKTEVQTGGFSKESILPKRNSDKLIARKKDWDPKKYGGFDSPTVAYSVLVVAKVEKGKSKKLK
SVKELLGITIMERSSFEKNPIDFLEAKGYKEVKKDLIIKLPKYSLFELENGRKRMLASAGELQKGNELALPSKY
VNFLYLASHYEKLKGSPEDNEQKQLFVEQHKHYLDEIIEQISEFSKRVILADANLDKVLSAYNKHRDKPIREQA
ENIIHLFTLTNLGAPAAFKYFDTTIDRKRYTSTKEVLDATLIHQSITGLYETRIDLSQLGGDSGGSPKKKRKV
ABE5.3: ecTadA_{(wild-type)}-(SGGS)₂-XTEN-(SGGS)₂-
ecTadA_{(H36L}_R51L_L84F_A106V_D108N_H123Y_S146C_D147Y_E155V_I156F_K157N)-(SGGS)₂-XTEN-
(SGGS)₂_nCas9_SGGS_NLS
(SEQ ID NO: 569)
MSEVEFSHEYWMRHALTLAKRAWDEREVPVGAVLVHNNRVIGEGWNRPIGRHDPTAHAEIMALRQGGLVMQNYR
LIDATLYVTLEPCVMCAGAMIHSRIGRVVFGARDAKTGAAGSLMDVLHHPGMNHRVEITEGILADECAALLSDF
FRMRRQEIKAQKKAQSSTDSGGSSGGSSGSETPGTSESATPESSGGSSGGSSEVEFSHEYWMRHALTLAKRAWD
EREVPVGAVLVLNNRVIGEGWNRPIGLHDPTAHAEIMALRQGGLVMQNYRLIDATLYVTFEPCVMCAGAMIHSR
IGRVVFGVRNAKTGAAGSLMDVLHYPGMNHRVEITEGILADECAALLCYFFRMRRQVFNAQKKAQSSTDSGGSS
GGSSGSETPGTSESATPESSGGSSGGSDKKYSIGLAIGTNSVGWAVITDEYKVPSKKFKVLGNTDRHSIKKNLI
GALLFDSGETAEATRLKRTARRRYTRRKNRICYLQEIFSNEMAKVDDSFFHRLEESFLVEEDKKHERHPIFGNI
VDEVAYHEKYPTIYHLRKKLVDSTDKADLRLIYLALAHMIKFRGHFLIEGDLNPDNSDVDKLFIQLVQTYNQLF
EENPINASGVDAKAILSARLSKSRRLENLIAQLPGEKKNGLFGNLIALSLGLTPNFKSNFDLAEDAKLQLSKDT
YDDDLDNLLAQIGDQYADLFLAAKNLSDAILLSDILRVNTEITKAPLSASMIKRYDEHHQDLTLLKALVRQQLP
EKYKEIFFDQSKNGYAGYIDGGASQEEFYKFIKPILEKMDGTEELLVKLNREDLLRKQRTFDNGSIPHQIHLGE
LHAILRRQEDFYPFLKDNREKIEKILTFRIPYYVGPLARGNSRFAWMTRKSEETITPWNFEEVVDKGASAQSFI
ERMTNFDKNLPNEKVLPKHSLLYEYFTVYNELTKVKYVTEGMRKPAFLSGEQKKAIVDLLFKTNRKVTVKQLKE
DYFKKIECFDSVEISGVEDRFNASLGTYHDLLKIIKDKDFLDNEENEDILEDIVLTLTLFEDREMIEERLKTYA
HLFDDKVMKQLKRRRYTGWGRLSRKLINGIRDKQSGKTILDFLKSDGFANRNFMQLIHDDSLTFKEDIQKAQVS
GQGDSLHEHIANLAGSPAIKKGILQTVKVVDELVKVMGRHKPENIVIEMARENQTTQKGQKNSRERMKRIEEGI
KELGSQILKEHPVENTQLQNEKLYLYYLQNGRDMYVDQELDINRLSDYDVDHIVPQSFLKDDSIDNKVLTRSDK
NRGKSDNVPSEEVVKKMKNYWRQLLNAKLITQRKFDNLTKAERGGLSELDKAGFIKRQLVETRQITKHVAQILD
SRMNTKYDENDKLIREVKVITLKSKLVSDFRKDFQFYKVREINNYHHAHDAYLNAVVGTALIKKYPKLESEFVY
GDYKVYDVRKMIAKSEQEIGKATAKYFFYSNIMNFFKTEITLANGEIRKRPLIETNGETGEIVWDKGRDFATVR
KVLSMPQVNIVKKTEVQTGGFSKESILPKRNSDKLIARKKDWDPKKYGGFDSPTVAYSVLVVAKVEKGKSKKLK
SVKELLGITIMERSSFEKNPIDFLEAKGYKEVKKDLIIKLPKYSLFELENGRKRMLASAGELQKGNELALPSKY
VNFLYLASHYEKLKGSPEDNEQKQLFVEQHKHYLDEIIEQISEFSKRVILADANLDKVLSAYNKHRDKPIREQA
ENIIHLFTLTNLGAPAAFKYFDTTIDRKRYTSTKEVLDATLIHQSITGLYETRIDLSQLGGDSGGSPKKKRKV
pNMG-558 amino acid sequence: ecTadA_{(wild-type)}- 32 a.a. linker-
ecTadA_{(H36L}_R51L_L84F_A106V_D108N_H123Y_S146C_D147Y_E155V_I156F_K157N)-24 a.a.
linker_nCas9_SGGS_NLS
(SEQ ID NO: 570)
MSEVEFSHEYWMRHALTLAKRAWDEREVPVGAVLVHNNRVIGEGWNRPIGRHDPTAHAEIMALRQGGLVMQNYR
LIDATLYVTLEPCVMCAGAMIHSRIGRVVFGARDAKTGAAGSLMDVLHHPGMNHRVEITEGILADECAALLSDF
FRMRRQEIKAQKKAQSSTDSGGSSGGSSGSETPGTSESATPESSGGSSGGSSEVEFSHEYWMRHALTLAKRAWD
EREVPVGAVLVLNNRVIGEGWNRPIGLHDPTAHAEIMALRQGGLVMQNYRLIDATLYVTFEPCVMCAGAMIHSR
IGRVVFGVRNAKTGAAGSLMDVLHYPGMNHRVEITEGILADECAALLCYFFRMRRQVFNAQKKAQSSTDSGGSS
GGSSGSETPGTSESATPESDKKYSIGLAIGTNSVGWAVITDEYKVPSKKFKVLGNTDRHSIKKNLIGALLFDSG
ETAEATRLKRTARRRYTRRKNRICYLQEIFSNEMAKVDDSFFHRLEESFLVEEDKKHERHPIFGNIVDEVAYHE
KYPTIYHLRKKLVDSTDKADLRLIYLALAHMIKFRGHFLIEGDLNPDNSDVDKLFIQLVQTYNQLFEENPINAS
GVDAKAILSARLSKSRRLENLIAQLPGEKKNGLFGNLIALSLGLTPNFKSNFDLAEDAKLQLSKDTYDDDLDNL
LAQIGDQYADLFLAAKNLSDAILLSDILRVNTEITKAPLSASMIKRYDEHHQDLTLLKALVRQQLPEKYKEIFF
DQSKNGYAGYIDGGASQEEFYKFIKPILEKMDGTEELLVKLNREDLLRKQRTFDNGSIPHQIHLGELHAILRRQ
EDFYPFLKDNREKIEKILTFRIPYYVGPLARGNSRFAWMTRKSEETITPWNFEEVVDKGASAQSFIERMTNFDK
NLPNEKVLPKHSLLYEYFTVYNELTKVKYVTEGMRKPAFLSGEQKKAIVDLLFKTNRKVTVKQLKEDYFKKIEC
FDSVEISGVEDRFNASLGTYHDLLKIIKDKDFLDNEENEDILEDIVLTLTLFEDREMIEERLKTYAHLFDDKVM
KQLKRRRYTGWGRLSRKLINGIRDKQSGKTILDFLKSDGFANRNFMQLIHDDSLTFKEDIQKAQVSGQGDSLHE
HIANLAGSPAIKKGILQTVKVVDELVKVMGRHKPENIVIEMARENQTTQKGQKNSRERMKRIEEGIKELGSQIL
KEHPVENTQLQNEKLYLYYLQNGRDMYVDQELDINRLSDYDVDHIVPQSFLKDDSIDNKVLTRSDKNRGKSDNV
PSEEVVKKMKNYWRQLLNAKLITQRKFDNLTKAERGGLSELDKAGFIKRQLVETRQITKHVAQILDSRMNTKYD
ENDKLIREVKVITLKSKLVSDFRKDFQFYKVREINNYHHAHDAYLNAVVGTALIKKYPKLESEFVYGDYKVYDV
RKMIAKSEQEIGKATAKYFFYSNIMNFFKTEITLANGEIRKRPLIETNGETGEIVWDKGRDFATVRKVLSMPQV
NIVKKTEVQTGGFSKESILPKRNSDKLIARKKDWDPKKYGGFDSPTVAYSVLVVAKVEKGKSKKLKSVKELLGI
TIMERSSFEKNPIDFLEAKGYKEVKKDLIIKLPKYSLFELENGRKRMLASAGELQKGNELALPSKYVNFLYLAS
HYEKLKGSPEDNEQKQLFVEQHKHYLDEIIEQISEFSKRVILADANLDKVLSAYNKHRDKPIREQAENIIHLFT
LTNLGAPAAFKYFDTTIDRKRYTSTKEVLDATLIHQSITGLYETRIDLSQLGGDSGGSPKKKRKV
pNMG-576 amino acid sequence: ecTadA_{(wild-type)}-(SGGS)₂-XTEN-(SGGS)₂-
ecTadA_{(H36L}_P48S_R51L_L84F_A106V_D108N_H123Y_S146C_D147Y_E155V_I156F_K157N)-(SGGS)₂-XTEN-
(SGGS)₂_nCas9_GGS_NLS
(SEQ ID NO: 571)
MSEVEFSHEYWMRHALTLAKRAWDEREVPVGAVLVHNNRVIGEGWNRPIGRHDPTAHAEIMALRQGGLVMQNYR
LIDATLYVTLEPCVMCAGAMIHSRIGRVVFGARDAKTGAAGSLMDVLHHPGMNHRVEITEGILADECAALLSDF
FRMRRQEIKAQKKAQSSTDSGGSSGGSSGSETPGTSESATPESSGGSSGGSSEVEFSHEYWMRHALTLAKRAWD
EREVPVGAVLVLNNRVIGEGWNRSIGLHDPTAHAEIMALRQGGLVMQNYRLIDATLYVTFEPCVMCAGAMIHSR
IGRVVFGVRNAKTGAAGSLMDVLHYPGMNHRVEITEGILADECAALLCYFFRMRRQVFNAQKKAQSSTDSGGSS
GGSSGSETPGTSESATPESSGGSSGGSDKKYSIGLAIGTNSVGWAVITDEYKVPSKKFKVLGNTDRHSIKKNLI
GALLFDSGETAEATRLKRTARRRYTRRKNRICYLQEIFSNEMAKVDDSFFHRLEESFLVEEDKKHERHPIFGNI
VDEVAYHEKYPTIYHLRKKLVDSTDKADLRLIYLALAHMIKFRGHFLIEGDLNPDNSDVDKLFIQLVQTYNQLF
EENPINASGVDAKAILSARLSKSRRLENLIAQLPGEKKNGLFGNLIALSLGLTPNFKSNFDLAEDAKLQLSKDT
YDDDLDNLLAQIGDQYADLFLAAKNLSDAILLSDILRVNTEITKAPLSASMIKRYDEHHQDLTLLKALVRQQLP
EKYKEIFFDQSKNGYAGYIDGGASQEEFYKFIKPILEKMDGTEELLVKLNREDLLRKQRTFDNGSIPHQIHLGE
LHAILRRQEDFYPFLKDNREKIEKILTFRIPYYVGPLARGNSRFAWMTRKSEETITPWNFEEVVDKGASAQSFI
ERMTNFDKNLPNEKVLPKHSLLYEYFTVYNELTKVKYVTEGMRKPAFLSGEQKKAIVDLLFKTNRKVTVKQLKE
DYFKKIECFDSVEISGVEDRFNASLGTYHDLLKIIKDKDFLDNEENEDILEDIVLTLTLFEDREMIEERLKTYA
HLFDDKVMKQLKRRRYTGWGRLSRKLINGIRDKQSGKTILDFLKSDGFANRNFMQLIHDDSLTFKEDIQKAQVS
GQGDSLHEHIANLAGSPAIKKGILQTVKVVDELVKVMGRHKPENIVIEMARENQTTQKGQKNSRERMKRIEEGI
KELGSQILKEHPVENTQLQNEKLYLYYLQNGRDMYVDQELDINRLSDYDVDHIVPQSFLKDDSIDNKVLTRSDK
NRGKSDNVPSEEVVKKMKNYWRQLLNAKLITQRKFDNLTKAERGGLSELDKAGFIKRQLVETRQITKHVAQILD
SRMNTKYDENDKLIREVKVITLKSKLVSDFRKDFQFYKVREINNYHHAHDAYLNAVVGTALIKKYPKLESEFVY
GDYKVYDVRKMIAKSEQEIGKATAKYFFYSNIMNFFKTEITLANGEIRKRPLIETNGETGEIVWDKGRDFATVR
KVLSMPQVNIVKKTEVQTGGFSKESILPKRNSDKLIARKKDWDPKKYGGFDSPTVAYSVLVVAKVEKGKSKKLK
SVKELLGITIMERSSFEKNPIDFLEAKGYKEVKKDLIIKLPKYSLFELENGRKRMLASAGELQKGNELALPSKY
VNFLYLASHYEKLKGSPEDNEQKQLFVEQHKHYLDEIIEQISEFSKRVILADANLDKVLSAYNKHRDKPIREQA
ENIIHLFTLTNLGAPAAFKYFDTTIDRKRYTSTKEVLDATLIHQSITGLYETRIDLSQLGGDSGGSPKKKRKV
pNMG-577 amino acid sequence: ecTadA_{(wild-type)}-(SGGS)₂-XTEN-(SGGS)₂-
ecTadA_{(H36L}_P48S_R51L_L84F_A106V_D108N_H123Y_A142N_S146C_D147Y_E155V_I156F_K157N)-(SGGS)₂-
XTEN-(SGGS)₂_nCas9_GGS_NLS
(SEQ ID NO: 572)
MSEVEFSHEYWMRHALTLAKRAWDEREVPVGAVLVHNNRVIGEGWNRPIGRHDPTAHAEIMALRQGGLVMQNYR
LIDATLYVTLEPCVMCAGAMIHSRIGRVVFGARDAKTGAAGSLMDVLHHPGMNHRVEITEGILADECAALLSDF
FRMRRQEIKAQKKAQSSTDSGGSSGGSSGSETPGTSESATPESSGGSSGGSSEVEFSHEYWMRHALTLAKRAWD
EREVPVGAVLVLNNRVIGEGWNRSIGLHDPTAHAEIMALRQGGLVMQNYRLIDATLYVTFEPCVMCAGAMIHSR
IGRVVFGVRNAKTGAAGSLMDVLHYPGMNHRVEITEGILADECNALLCYFFRMRRQVFNAQKKAQSSTDSGGSS
GGSSGSETPGTSESATPESSGGSSGGSDKKYSIGLAIGTNSVGWAVITDEYKVPSKKFKVLGNTDRHSIKKNLI
GALLFDSGETAEATRLKRTARRRYTRRKNRICYLQEIFSNEMAKVDDSFFHRLEESFLVEEDKKHERHPIFGNI
VDEVAYHEKYPTIYHLRKKLVDSTDKADLRLIYLALAHMIKFRGHFLIEGDLNPDNSDVDKLFIQLVQTYNQLF
EENPINASGVDAKAILSARLSKSRRLENLIAQLPGEKKNGLFGNLIALSLGLTPNFKSNFDLAEDAKLQLSKDT
YDDDLDNLLAQIGDQYADLFLAAKNLSDAILLSDILRVNTEITKAPLSASMIKRYDEHHQDLTLLKALVRQQLP
EKYKEIFFDQSKNGYAGYIDGGASQEEFYKFIKPILEKMDGTEELLVKLNREDLLRKQRTFDNGSIPHQIHLGE
LHAILRRQEDFYPFLKDNREKIEKILTFRIPYYVGPLARGNSRFAWMTRKSEETITPWNFEEVVDKGASAQSFI
ERMTNFDKNLPNEKVLPKHSLLYEYFTVYNELTKVKYVTEGMRKPAFLSGEQKKAIVDLLFKTNRKVTVKQLKE
DYFKKIECFDSVEISGVEDRFNASLGTYHDLLKIIKDKDFLDNEENEDILEDIVLTLTLFEDREMIEERLKTYA
HLFDDKVMKQLKRRRYTGWGRLSRKLINGIRDKQSGKTILDFLKSDGFANRNFMQLIHDDSLTFKEDIQKAQVS
GQGDSLHEHIANLAGSPAIKKGILQTVKVVDELVKVMGRHKPENIVIEMARENQTTQKGQKNSRERMKRIEEGI
KELGSQILKEHPVENTQLQNEKLYLYYLQNGRDMYVDQELDINRLSDYDVDHIVPQSFLKDDSIDNKVLTRSDK
NRGKSDNVPSEEVVKKMKNYWRQLLNAKLITQRKFDNLTKAERGGLSELDKAGFIKRQLVETRQITKHVAQILD
SRMNTKYDENDKLIREVKVITLKSKLVSDFRKDFQFYKVREINNYHHAHDAYLNAVVGTALIKKYPKLESEFVY
GDYKVYDVRKMIAKSEQEIGKATAKYFFYSNIMNFFKTEITLANGEIRKRPLIETNGETGEIVWDKGRDFATVR
KVLSMPQVNIVKKTEVQTGGFSKESILPKRNSDKLIARKKDWDPKKYGGFDSPTVAYSVLVVAKVEKGKSKKLK
SVKELLGITIMERSSFEKNPIDFLEAKGYKEVKKDLIIKLPKYSLFELENGRKRMLASAGELQKGNELALPSKY
VNFLYLASHYEKLKGSPEDNEQKQLFVEQHKHYLDEIIEQISEFSKRVILADANLDKVLSAYNKHRDKPIREQA
ENIIHLFTLTNLGAPAAFKYFDTTIDRKRYTSTKEVLDATLIHQSITGLYETRIDLSQLGGDSGGSPKKKRKV
pNMG-586 amino acid sequence: ecTadA_{(wild-type)}-(SGGS)₂-XTEN-(SGGS)₂-
ecTadA_{(H36L}_P48A_R51L_L84F_A106V_D108N_H123Y_S146C_D147Y_E155V_I156F_K157N)-(SGGS)₂-XTEN-
(SGGS)₂_nCas9_GGS_NLS
(SEQ ID NO: 573)
MSEVEFSHEYWMRHALTLAKRAWDEREVPVGAVLVHNNRVIGEGWNRPIGRHDPTAHAEIMALRQGGLVMQNYR
LIDATLYVTLEPCVMCAGAMIHSRIGRVVFGARDAKTGAAGSLMDVLHHPGMNHRVEITEGILADECAALLSDF
FRMRRQEIKAQKKAQSSTDSGGSSGGSSGSETPGTSESATPESSGGSSGGSSEVEFSHEYWMRHALTLAKRAWD
EREVPVGAVLVLNNRVIGEGWNRAIGLHDPTAHAEIMALRQGGLVMQNYRLIDATLYVTFEPCVMCAGAMIHSR
IGRVVFGVRNAKTGAAGSLMDVLHYPGMNHRVEITEGILADECAALLCYFFRMRRQVFNAQKKAQSSTDSGGSS
GGSSGSETPGTSESATPESSGGSSGGSDKKYSIGLAIGTNSVGWAVITDEYKVPSKKFKVLGNTDRHSIKKNLI
GALLFDSGETAEATRLKRTARRRYTRRKNRICYLQEIFSNEMAKVDDSFFHRLEESFLVEEDKKHERHPIFGNI
VDEVAYHEKYPTIYHLRKKLVDSTDKADLRLIYLALAHMIKFRGHFLIEGDLNPDNSDVDKLFIQLVQTYNQLF
EENPINASGVDAKAILSARLSKSRRLENLIAQLPGEKKNGLFGNLIALSLGLTPNFKSNFDLAEDAKLQLSKDT
YDDDLDNLLAQIGDQYADLFLAAKNLSDAILLSDILRVNTEITKAPLSASMIKRYDEHHQDLTLLKALVRQQLP
EKYKEIFFDQSKNGYAGYIDGGASQEEFYKFIKPILEKMDGTEELLVKLNREDLLRKQRTFDNGSIPHQIHLGE
LHAILRRQEDFYPFLKDNREKIEKILTFRIPYYVGPLARGNSRFAWMTRKSEETITPWNFEEVVDKGASAQSFI
ERMTNFDKNLPNEKVLPKHSLLYEYFTVYNELTKVKYVTEGMRKPAFLSGEQKKAIVDLLFKTNRKVTVKQLKE
DYFKKIECFDSVEISGVEDRFNASLGTYHDLLKIIKDKDFLDNEENEDILEDIVLTLTLFEDREMIEERLKTYA
HLFDDKVMKQLKRRRYTGWGRLSRKLINGIRDKQSGKTILDFLKSDGFANRNFMQLIHDDSLTFKEDIQKAQVS
GQGDSLHEHIANLAGSPAIKKGILQTVKVVDELVKVMGRHKPENIVIEMARENQTTQKGQKNSRERMKRIEEGI
KELGSQILKEHPVENTQLQNEKLYLYYLQNGRDMYVDQELDINRLSDYDVDHIVPQSFLKDDSIDNKVLTRSDK
NRGKSDNVPSEEVVKKMKNYWRQLLNAKLITQRKFDNLTKAERGGLSELDKAGFIKRQLVETRQITKHVAQILD
SRMNTKYDENDKLIREVKVITLKSKLVSDFRKDFQFYKVREINNYHHAHDAYLNAVVGTALIKKYPKLESEFVY
GDYKVYDVRKMIAKSEQEIGKATAKYFFYSNIMNFFKTEITLANGEIRKRPLIETNGETGEIVWDKGRDFATVR
KVLSMPQVNIVKKTEVQTGGFSKESILPKRNSDKLIARKKDWDPKKYGGFDSPTVAYSVLVVAKVEKGKSKKLK
SVKELLGITIMERSSFEKNPIDFLEAKGYKEVKKDLIIKLPKYSLFELENGRKRMLASAGELQKGNELALPSKY
VNFLYLASHYEKLKGSPEDNEQKQLFVEQHKHYLDEIIEQISEFSKRVILADANLDKVLSAYNKHRDKPIREQA
ENIIHLFTLTNLGAPAAFKYFDTTIDRKRYTSTKEVLDATLIHQSITGLYETRIDLSQLGGDSGGSPKKKRKV
ABE7.2: ecTadA_{(wild-type)}-(SGGS)₂-XTEN-(SGGS)₂-
ecTadA_{(H36L}_P48A_RS1L_L84F_A106V_D108N_H123Y_A142N_S146C_D147Y_E155V_I156F_K157N)-(SGGS)₂-
XTEN-(SGGS)₂_nCas9_GGS_NLS
(SEQ ID NO: 574)
MSEVEFSHEYWMRHALTLAKRAWDEREVPVGAVLVHNNRVIGEGWNRPIGRHDPTAHAEIMALRQGGLVMQNYR
LIDATLYVTLEPCVMCAGAMIHSRIGRVVFGARDAKTGAAGSLMDVLHHPGMNHRVEITEGILADECAALLSDF
FRMRRQEIKAQKKAQSSTDSGGSSGGSSGSETPGTSESATPESSGGSSGGSSEVEFSHEYWMRHALTLAKRAWD
EREVPVGAVLVLNNRVIGEGWNRAIGLHDPTAHAEIMALRQGGLVMQNYRLIDATLYVTFEPCVMCAGAMIHSR
IGRVVFGVRNAKTGAAGSLMDVLHYPGMNHRVEITEGILADECNALLCYFFRMRRQVFNAQKKAQSSTDSGGSS
GGSSGSETPGTSESATPESSGGSSGGSDKKYSIGLAIGTNSVGWAVITDEYKVPSKKFKVLGNTDRHSIKKNLI
GALLFDSGETAEATRLKRTARRRYTRRKNRICYLQEIFSNEMAKVDDSFFHRLEESFLVEEDKKHERHPIFGNI
VDEVAYHEKYPTIYHLRKKLVDSTDKADLRLIYLALAHMIKFRGHFLIEGDLNPDNSDVDKLFIQLVQTYNQLF
EENPINASGVDAKAILSARLSKSRRLENLIAQLPGEKKNGLFGNLIALSLGLTPNFKSNFDLAEDAKLQLSKDT
YDDDLDNLLAQIGDQYADLFLAAKNLSDAILLSDILRVNTEITKAPLSASMIKRYDEHHQDLTLLKALVRQQLP
EKYKEIFFDQSKNGYAGYIDGGASQEEFYKFIKPILEKMDGTEELLVKLNREDLLRKQRTFDNGSIPHQIHLGE
LHAILRRQEDFYPFLKDNREKIEKILTFRIPYYVGPLARGNSRFAWMTRKSEETITPWNFEEVVDKGASAQSFI
ERMTNFDKNLPNEKVLPKHSLLYEYFTVYNELTKVKYVTEGMRKPAFLSGEQKKAIVDLLFKTNRKVTVKQLKE
DYFKKIECFDSVEISGVEDRFNASLGTYHDLLKIIKDKDFLDNEENEDILEDIVLTLTLFEDREMIEERLKTYA
HLFDDKVMKQLKRRRYTGWGRLSRKLINGIRDKQSGKTILDFLKSDGFANRNFMQLIHDDSLTFKEDIQKAQVS
GQGDSLHEHIANLAGSPAIKKGILQTVKVVDELVKVMGRHKPENIVIEMARENQTTQKGQKNSRERMKRIEEGI
KELGSQILKEHPVENTQLQNEKLYLYYLQNGRDMYVDQELDINRLSDYDVDHIVPQSFLKDDSIDNKVLTRSDK
NRGKSDNVPSEEVVKKMKNYWRQLLNAKLITQRKFDNLTKAERGGLSELDKAGFIKRQLVETRQITKHVAQILD
SRMNTKYDENDKLIREVKVITLKSKLVSDFRKDFQFYKVREINNYHHAHDAYLNAVVGTALIKKYPKLESEFVY
GDYKVYDVRKMIAKSEQEIGKATAKYFFYSNIMNFFKTEITLANGEIRKRPLIETNGETGEIVWDKGRDFATVR
KVLSMPQVNIVKKTEVQTGGFSKESILPKRNSDKLIARKKDWDPKKYGGFDSPTVAYSVLVVAKVEKGKSKKLK
SVKELLGITIMERSSFEKNPIDFLEAKGYKEVKKDLIIKLPKYSLFELENGRKRMLASAGELQKGNELALPSKY
VNFLYLASHYEKLKGSPEDNEQKQLFVEQHKHYLDEIIEQISEFSKRVILADANLDKVLSAYNKHRDKPIREQA
ENIIHLFTLTNLGAPAAFKYFDTTIDRKRYTSTKEVLDATLIHQSITGLYETRIDLSQLGGDSGGSPKKKRKV
pNMG-620 amino acid sequence: ecTadA_{(wild-type)}-(SGGS)₂-XTEN-(SGGS)₂-
ecTadA_{(W23R}_H36L_P48A_R51L_L84F_A106V_D108N_H123Y_S146C_D147Y_R152P_E155V_I156F_K157N)-
(SGGS)₂-XTEN-(SGGS)₂_nCas9_GGS_NLS
(SEQ ID NO: 575)
MSEVEFSHEYWMRHALTLAKRAWDEREVPVGAVLVHNNRVIGEGWNRPIGRHDPTAHAEIMALRQGGLVMQNYR
LIDATLYVTLEPCVMCAGAMIHSRIGRVVFGARDAKTGAAGSLMDVLHHPGMNHRVEITEGILADECAALLSDF
FRMRRQEIKAQKKAQSSTDSGGSSGGSSGSETPGTSESATPESSGGSSGGSSEVEFSHEYWMRHALTLAKRARD
EREVPVGAVLVLNNRVIGEGWNRAIGLHDPTAHAEIMALRQGGLVMQNYRLIDATLYVTFEPCVMCAGAMIHSR
IGRVVFGVRNAKTGAAGSLMDVLHYPGMNHRVEITEGILADECAALLCYFFRMPRQVFNAQKKAQSSTDSGGSS
GGSSGSETPGTSESATPESSGGSSGGSDKKYSIGLAIGTNSVGWAVITDEYKVPSKKFKVLGNTDRHSIKKNLI
GALLFDSGETAEATRLKRTARRRYTRRKNRICYLQEIFSNEMAKVDDSFFHRLEESFLVEEDKKHERHPIFGNI
VDEVAYHEKYPTIYHLRKKLVDSTDKADLRLIYLALAHMIKFRGHFLIEGDLNPDNSDVDKLFIQLVQTYNQLF
EENPINASGVDAKAILSARLSKSRRLENLIAQLPGEKKNGLFGNLIALSLGLTPNFKSNFDLAEDAKLQLSKDT
YDDDLDNLLAQIGDQYADLFLAAKNLSDAILLSDILRVNTEITKAPLSASMIKRYDEHHQDLTLLKALVRQQLP
EKYKEIFFDQSKNGYAGYIDGGASQEEFYKFIKPILEKMDGTEELLVKLNREDLLRKQRTFDNGSIPHQIHLGE
LHAILRRQEDFYPFLKDNREKIEKILTFRIPYYVGPLARGNSRFAWMTRKSEETITPWNFEEVVDKGASAQSFI
ERMTNFDKNLPNEKVLPKHSLLYEYFTVYNELTKVKYVTEGMRKPAFLSGEQKKAIVDLLFKTNRKVTVKQLKE
DYFKKIECFDSVEISGVEDRFNASLGTYHDLLKIIKDKDFLDNEENEDILEDIVLTLTLFEDREMIEERLKTYA
HLFDDKVMKQLKRRRYTGWGRLSRKLINGIRDKQSGKTILDFLKSDGFANRNFMQLIHDDSLTFKEDIQKAQVS
GQGDSLHEHIANLAGSPAIKKGILQTVKVVDELVKVMGRHKPENIVIEMARENQTTQKGQKNSRERMKRIEEGI
KELGSQILKEHPVENTQLQNEKLYLYYLQNGRDMYVDQELDINRLSDYDVDHIVPQSFLKDDSIDNKVLTRSDK
NRGKSDNVPSEEVVKKMKNYWRQLLNAKLITQRKFDNLTKAERGGLSELDKAGFIKRQLVETRQITKHVAQILD
SRMNTKYDENDKLIREVKVITLKSKLVSDFRKDFQFYKVREINNYHHAHDAYLNAVVGTALIKKYPKLESEFVY
GDYKVYDVRKMIAKSEQEIGKATAKYFFYSNIMNFFKTEITLANGEIRKRPLIETNGETGEIVWDKGRDFATVR
KVLSMPQVNIVKKTEVQTGGFSKESILPKRNSDKLIARKKDWDPKKYGGFDSPTVAYSVLVVAKVEKGKSKKLK
SVKELLGITIMERSSFEKNPIDFLEAKGYKEVKKDLIIKLPKYSLFELENGRKRMLASAGELQKGNELALPSKY
VNFLYLASHYEKLKGSPEDNEQKQLFVEQHKHYLDEIIEQISEFSKRVILADANLDKVLSAYNKHRDKPIREQA
ENIIHLFTLTNLGAPAAFKYFDTTIDRKRYTSTKEVLDATLIHQSITGLYETRIDLSQLGGDSGGSPKKKRKV
pNMG-617 amino acid sequence: ecTadA_{(wild-type)}-(SGGS)₂-XTEN-(SGGS)₂-
ecTadA_{(W23L}_H36L_P48A_R51L_L84F_A106V_D108N_H123Y_A142A_S146C_D147Y_E155V_I156F_K157N)-
(SGGS)₂-XTEN-(SGGS)₂_nCas9_GGS_NLS
(SEQ ID NO: 576)
MSEVEFSHEYWMRHALTLAKRAWDEREVPVGAVLVHNNRVIGEGWNRPIGRHDPTAHAEIMALRQGGLVMQNYR
LIDATLYVTLEPCVMCAGAMIHSRIGRVVFGARDAKTGAAGSLMDVLHHPGMNHRVEITEGILADECAALLSDF
FRMRRQEIKAQKKAQSSTDSGGSSGGSSGSETPGTSESATPESSGGSSGGSSEVEFSHEYWMRHALTLAKRALD
EREVPVGAVLVLNNRVIGEGWNRAIGLHDPTAHAEIMALRQGGLVMQNYRLIDATLYVTFEPCVMCAGAMIHSR
IGRVVFGVRNAKTGAAGSLMDVLHYPGMNHRVEITEGILADECNALLCYFFRMRRQVFNAQKKAQSSTDSGGSS
GGSSGSETPGTSESATPESSGGSSGGSDKKYSIGLAIGTNSVGWAVITDEYKVPSKKFKVLGNTDRHSIKKNLI
GALLFDSGETAEATRLKRTARRRYTRRKNRICYLQEIFSNEMAKVDDSFFHRLEESFLVEEDKKHERHPIFGNI
VDEVAYHEKYPTIYHLRKKLVDSTDKADLRLIYLALAHMIKFRGHFLIEGDLNPDNSDVDKLFIQLVQTYNQLF
EENPINASGVDAKAILSARLSKSRRLENLIAQLPGEKKNGLFGNLIALSLGLTPNFKSNFDLAEDAKLQLSKDT
YDDDLDNLLAQIGDQYADLFLAAKNLSDAILLSDILRVNTEITKAPLSASMIKRYDEHHQDLTLLKALVRQQLP
EKYKEIFFDQSKNGYAGYIDGGASQEEFYKFIKPILEKMDGTEELLVKLNREDLLRKQRTFDNGSIPHQIHLGE
LHAILRRQEDFYPFLKDNREKIEKILTFRIPYYVGPLARGNSRFAWMTRKSEETITPWNFEEVVDKGASAQSFI
ERMTNFDKNLPNEKVLPKHSLLYEYFTVYNELTKVKYVTEGMRKPAFLSGEQKKAIVDLLFKTNRKVTVKQLKE
DYFKKIECFDSVEISGVEDRFNASLGTYHDLLKIIKDKDFLDNEENEDILEDIVLTLTLFEDREMIEERLKTYA
HLFDDKVMKQLKRRRYTGWGRLSRKLINGIRDKQSGKTILDFLKSDGFANRNFMQLIHDDSLTFKEDIQKAQVS
GQGDSLHEHIANLAGSPAIKKGILQTVKVVDELVKVMGRHKPENIVIEMARENQTTQKGQKNSRERMKRIEEGI
KELGSQILKEHPVENTQLQNEKLYLYYLQNGRDMYVDQELDINRLSDYDVDHIVPQSFLKDDSIDNKVLTRSDK
NRGKSDNVPSEEVVKKMKNYWRQLLNAKLITQRKFDNLTKAERGGLSELDKAGFIKRQLVETRQITKHVAQILD
SRMNTKYDENDKLIREVKVITLKSKLVSDFRKDFQFYKVREINNYHHAHDAYLNAVVGTALIKKYPKLESEFVY
GDYKVYDVRKMIAKSEQEIGKATAKYFFYSNIMNFFKTEITLANGEIRKRPLIETNGETGEIVWDKGRDFATVR
KVLSMPQVNIVKKTEVQTGGFSKESILPKRNSDKLIARKKDWDPKKYGGFDSPTVAYSVLVVAKVEKGKSKKLK
SVKELLGITIMERSSFEKNPIDFLEAKGYKEVKKDLIIKLPKYSLFELENGRKRMLASAGELQKGNELALPSKY
VNFLYLASHYEKLKGSPEDNEQKQLFVEQHKHYLDEIIEQISEFSKRVILADANLDKVLSAYNKHRDKPIREQA
ENIIHLFTLTNLGAPAAFKYFDTTIDRKRYTSTKEVLDATLIHQSITGLYETRIDLSQLGGDSGGSPKKKRKV
pNMG-618 amino acid sequence: ecTadA_{(wild-type)}-(SGGS)₂-XTEN-(SGGS)₂-
ecTadA_{(W23L}_H36L_P48A_R51L_L84F_A106V_D108N_H123Y_A142A_S146C_D147Y_R152P_E155V_I156F_K157N)-
(SGGS)₂-XTEN-(SGGS)₂_nCas9_GGS_NLS
(SEQ ID NO: 577)
MSEVEFSHEYWMRHALTLAKRAWDEREVPVGAVLVHNNRVIGEGWNRPIGRHDPTAHAEIMALRQGGLVMQNYR
LIDATLYVTLEPCVMCAGAMIHSRIGRVVFGARDAKTGAAGSLMDVLHHPGMNHRVEITEGILADECAALLSDF
FRMRRQEIKAQKKAQSSTDSGGSSGGSSGSETPGTSESATPESSGGSSGGSSEVEFSHEYWMRHALTLAKRALD
EREVPVGAVLVLNNRVIGEGWNRAIGLHDPTAHAEIMALRQGGLVMQNYRLIDATLYVTFEPCVMCAGAMIHSR
IGRVVFGVRNAKTGAAGSLMDVLHYPGMNHRVEITEGILADECNALLCYFFRMPRQVFNAQKKAQSSTDSGGSS
GGSSGSETPGTSESATPESSGGSSGGSDKKYSIGLAIGTNSVGWAVITDEYKVPSKKFKVLGNTDRHSIKKNLI
GALLFDSGETAEATRLKRTARRRYTRRKNRICYLQEIFSNEMAKVDDSFFHRLEESFLVEEDKKHERHPIFGNI
VDEVAYHEKYPTIYHLRKKLVDSTDKADLRLIYLALAHMIKFRGHFLIEGDLNPDNSDVDKLFIQLVQTYNQLF
EENPINASGVDAKAILSARLSKSRRLENLIAQLPGEKKNGLFGNLIALSLGLTPNFKSNFDLAEDAKLQLSKDT
YDDDLDNLLAQIGDQYADLFLAAKNLSDAILLSDILRVNTEITKAPLSASMIKRYDEHHQDLTLLKALVRQQLP
EKYKEIFFDQSKNGYAGYIDGGASQEEFYKFIKPILEKMDGTEELLVKLNREDLLRKQRTFDNGSIPHQIHLGE
LHAILRRQEDFYPFLKDNREKIEKILTFRIPYYVGPLARGNSRFAWMTRKSEETITPWNFEEVVDKGASAQSFI
ERMTNFDKNLPNEKVLPKHSLLYEYFTVYNELTKVKYVTEGMRKPAFLSGEQKKAIVDLLFKTNRKVTVKQLKE
DYFKKIECFDSVEISGVEDRFNASLGTYHDLLKIIKDKDFLDNEENEDILEDIVLTLTLFEDREMIEERLKTYA
HLFDDKVMKQLKRRRYTGWGRLSRKLINGIRDKQSGKTILDFLKSDGFANRNFMQLIHDDSLTFKEDIQKAQVS
GQGDSLHEHIANLAGSPAIKKGILQTVKVVDELVKVMGRHKPENIVIEMARENQTTQKGQKNSRERMKRIEEGI
KELGSQILKEHPVENTQLQNEKLYLYYLQNGRDMYVDQELDINRLSDYDVDHIVPQSFLKDDSIDNKVLTRSDK
NRGKSDNVPSEEVVKKMKNYWRQLLNAKLITQRKFDNLTKAERGGLSELDKAGFIKRQLVETRQITKHVAQILD
SRMNTKYDENDKLIREVKVITLKSKLVSDFRKDFQFYKVREINNYHHAHDAYLNAVVGTALIKKYPKLESEFVY
GDYKVYDVRKMIAKSEQEIGKATAKYFFYSNIMNFFKTEITLANGEIRKRPLIETNGETGEIVWDKGRDFATVR
KVLSMPQVNIVKKTEVQTGGFSKESILPKRNSDKLIARKKDWDPKKYGGFDSPTVAYSVLVVAKVEKGKSKKLK
SVKELLGITIMERSSFEKNPIDFLEAKGYKEVKKDLIIKLPKYSLFELENGRKRMLASAGELQKGNELALPSKY
VNFLYLASHYEKLKGSPEDNEQKQLFVEQHKHYLDEIIEQISEFSKRVILADANLDKVLSAYNKHRDKPIREQA
ENIIHLFTLTNLGAPAAFKYFDTTIDRKRYTSTKEVLDATLIHQSITGLYETRIDLSQLGGDSGGSPKKKRKV
pNMG-620 amino acid sequence: ecTadA_{(wild-type)}-(SGGS)₂-XTEN-(SGGS)₂-
ecTadA_{(W23R}_H36L_P48A_R51L_L84F_A106V_D108N_H123Y_S146C_D147Y_R152P_E155V_I156F_K157N)-
(SGGS)₂-XTEN-(SGGS)₂_nCas9_GGS_NLS
(SEQ ID NO: 578)
MSEVEFSHEYWMRHALTLAKRAWDEREVPVGAVLVHNNRVIGEGWNRPIGRHDPTAHAEIMALRQGGLVMQNYR
LIDATLYVTLEPCVMCAGAMIHSRIGRVVFGARDAKTGAAGSLMDVLHHPGMNHRVEITEGILADECAALLSDF
FRMRRQEIKAQKKAQSSTDSGGSSGGSSGSETPGTSESATPESSGGSSGGSSEVEFSHEYWMRHALTLAKRARD
EREVPVGAVLVLNNRVIGEGWNRAIGLHDPTAHAEIMALRQGGLVMQNYRLIDATLYVTFEPCVMCAGAMIHSR
IGRVVFGVRNAKTGAAGSLMDVLHYPGMNHRVEITEGILADECAALLCYFFRMPRQVFNAQKKAQSSTDSGGSS
GGSSGSETPGTSESATPESSGGSSGGSDKKYSIGLAIGTNSVGWAVITDEYKVPSKKFKVLGNTDRHSIKKNLI
GALLFDSGETAEATRLKRTARRRYTRRKNRICYLQEIFSNEMAKVDDSFFHRLEESFLVEEDKKHERHPIFGNI
VDEVAYHEKYPTIYHLRKKLVDSTDKADLRLIYLALAHMIKFRGHFLIEGDLNPDNSDVDKLFIQLVQTYNQLF
EENPINASGVDAKAILSARLSKSRRLENLIAQLPGEKKNGLFGNLIALSLGLTPNFKSNFDLAEDAKLQLSKDT
YDDDLDNLLAQIGDQYADLFLAAKNLSDAILLSDILRVNTEITKAPLSASMIKRYDEHHQDLTLLKALVRQQLP
EKYKEIFFDQSKNGYAGYIDGGASQEEFYKFIKPILEKMDGTEELLVKLNREDLLRKQRTFDNGSIPHQIHLGE
LHAILRRQEDFYPFLKDNREKIEKILTFRIPYYVGPLARGNSRFAWMTRKSEETITPWNFEEVVDKGASAQSFI
ERMTNFDKNLPNEKVLPKHSLLYEYFTVYNELTKVKYVTEGMRKPAFLSGEQKKAIVDLLFKTNRKVTVKQLKE
DYFKKIECFDSVEISGVEDRFNASLGTYHDLLKIIKDKDFLDNEENEDILEDIVLTLTLFEDREMIEERLKTYA
HLFDDKVMKQLKRRRYTGWGRLSRKLINGIRDKQSGKTILDFLKSDGFANRNFMQLIHDDSLTFKEDIQKAQVS
GQGDSLHEHIANLAGSPAIKKGILQTVKVVDELVKVMGRHKPENIVIEMARENQTTQKGQKNSRERMKRIEEGI
KELGSQILKEHPVENTQLQNEKLYLYYLQNGRDMYVDQELDINRLSDYDVDHIVPQSFLKDDSIDNKVLTRSDK
NRGKSDNVPSEEVVKKMKNYWRQLLNAKLITQRKFDNLTKAERGGLSELDKAGFIKRQLVETRQITKHVAQILD
SRMNTKYDENDKLIREVKVITLKSKLVSDFRKDFQFYKVREINNYHHAHDAYLNAVVGTALIKKYPKLESEFVY
GDYKVYDVRKMIAKSEQEIGKATAKYFFYSNIMNFFKTEITLANGEIRKRPLIETNGETGEIVWDKGRDFATVR
KVLSMPQVNIVKKTEVQTGGFSKESILPKRNSDKLIARKKDWDPKKYGGFDSPTVAYSVLVVAKVEKGKSKKLK
SVKELLGITIMERSSFEKNPIDFLEAKGYKEVKKDLIIKLPKYSLFELENGRKRMLASAGELQKGNELALPSKY
VNFLYLASHYEKLKGSPEDNEQKQLFVEQHKHYLDEIIEQISEFSKRVILADANLDKVLSAYNKHRDKPIREQA
ENIIHLFTLTNLGAPAAFKYFDTTIDRKRYTSTKEVLDATLIHQSITGLYETRIDLSQLGGDSGGSPKKKRKV
pNMG-621 amino acid sequence: ecTadA_{(wild-type)}-32 a.a. linker-
ecTadA_{(H36L}_P48A_R51L_L84F_A106V_D108N_H123Y_S146C_D147Y_R152P_E155V_I156F_K157N)-24 a.a.
linker_nCas9_GGS_NLS
(SEQ ID NO: 579)
MSEVEFSHEYWMRHALTLAKRAWDEREVPVGAVLVHNNRVIGEGWNRPIGRHDPTAHAEIMALRQGGLVMQNYR
LIDATLYVTLEPCVMCAGAMIHSRIGRVVFGARDAKTGAAGSLMDVLHHPGMNHRVEITEGILADECAALLSDF
FRMRRQEIKAQKKAQSSTDSGGSSGGSSGSETPGTSESATPESSGGSSGGSSEVEFSHEYWMRHALTLAKRAWD
EREVPVGAVLVLNNRVIGEGWNRAIGLHDPTAHAEIMALRQGGLVMQNYRLIDATLYVTFEPCVMCAGAMIHSR
IGRVVFGVRNAKTGAAGSLMDVLHYPGMNHRVEITEGILADECAALLCYFFRMPRQVFNAQKKAQSSTDSGGSS
GGSSGSETPGTSESATPESDKKYSIGLAIGTNSVGWAVITDEYKVPSKKFKVLGNTDRHSIKKNLIGALLFDSG
ETAEATRLKRTARRRYTRRKNRICYLQEIFSNEMAKVDDSFFHRLEESFLVEEDKKHERHPIFGNIVDEVAYHE
KYPTIYHLRKKLVDSTDKADLRLIYLALAHMIKFRGHFLIEGDLNPDNSDVDKLFIQLVQTYNQLFEENPINAS
GVDAKAILSARLSKSRRLENLIAQLPGEKKNGLFGNLIALSLGLTPNFKSNFDLAEDAKLQLSKDTYDDDLDNL
LAQIGDQYADLFLAAKNLSDAILLSDILRVNTEITKAPLSASMIKRYDEHHQDLTLLKALVRQQLPEKYKEIFF
DQSKNGYAGYIDGGASQEEFYKFIKPILEKMDGTEELLVKLNREDLLRKQRTFDNGSIPHQIHLGELHAILRRQ
EDFYPFLKDNREKIEKILTFRIPYYVGPLARGNSRFAWMTRKSEETITPWNFEEVVDKGASAQSFIERMTNFDK
NLPNEKVLPKHSLLYEYFTVYNELTKVKYVTEGMRKPAFLSGEQKKAIVDLLFKTNRKVTVKQLKEDYFKKIEC
FDSVEISGVEDRFNASLGTYHDLLKIIKDKDFLDNEENEDILEDIVLTLTLFEDREMIEERLKTYAHLFDDKVM
KQLKRRRYTGWGRLSRKLINGIRDKQSGKTILDFLKSDGFANRNFMQLIHDDSLTFKEDIQKAQVSGQGDSLHE
HIANLAGSPAIKKGILQTVKVVDELVKVMGRHKPENIVIEMARENQTTQKGQKNSRERMKRIEEGIKELGSQIL
KEHPVENTQLQNEKLYLYYLQNGRDMYVDQELDINRLSDYDVDHIVPQSFLKDDSIDNKVLTRSDKNRGKSDNV
PSEEVVKKMKNYWRQLLNAKLITQRKFDNLTKAERGGLSELDKAGFIKRQLVETRQITKHVAQILDSRMNTKYD
ENDKLIREVKVITLKSKLVSDFRKDFQFYKVREINNYHHAHDAYLNAVVGTALIKKYPKLESEFVYGDYKVYDV
RKMIAKSEQEIGKATAKYFFYSNIMNFFKTEITLANGEIRKRPLIETNGETGEIVWDKGRDFATVRKVLSMPQV
NIVKKTEVQTGGFSKESILPKRNSDKLIARKKDWDPKKYGGFDSPTVAYSVLVVAKVEKGKSKKLKSVKELLGI
TIMERSSFEKNPIDFLEAKGYKEVKKDLIIKLPKYSLFELENGRKRMLASAGELQKGNELALPSKYVNFLYLAS
HYEKLKGSPEDNEQKQLFVEQHKHYLDEIIEQISEFSKRVILADANLDKVLSAYNKHRDKPIREQAENIIHLFT
LTNLGAPAAFKYFDTTIDRKRYTSTKEVLDATLIHQSITGLYETRIDLSQLGGDSGGSPKKKRKV
pNMG-622 amino acid sequence: ecTadA_{(wild-type)}-32 a.a. linker-
ecTadA_{(H36L}_P48A_R51L_L84F_A106V_D108N_H123Y_A142N_S146C_D147Y_R152P_E155V_I156F_K157N)-24 a.a.
linker_nCas9_GGS_NLS
(SEQ ID NO: 580)
MSEVEFSHEYWMRHALTLAKRAWDEREVPVGAVLVHNNRVIGEGWNRPIGRHDPTAHAEIMALRQGGLVMQNYR
LIDATLYVTLEPCVMCAGAMIHSRIGRVVFGARDAKTGAAGSLMDVLHHPGMNHRVEITEGILADECAALLSDF
FRMRRQEIKAQKKAQSSTDSGGSSGGSSGSETPGTSESATPESSGGSSGGSSEVEFSHEYWMRHALTLAKRAWD
EREVPVGAVLVLNNRVIGEGWNRAIGLHDPTAHAEIMALRQGGLVMQNYRLIDATLYVTFEPCVMCAGAMIHSR
IGRVVFGVRNAKTGAAGSLMDVLHYPGMNHRVEITEGILADECNALLCYFFRMPRQVFNAQKKAQSSTDSGGSS
GGSSGSETPGTSESATPESDKKYSIGLAIGTNSVGWAVITDEYKVPSKKFKVLGNTDRHSIKKNLIGALLFDSG
ETAEATRLKRTARRRYTRRKNRICYLQEIFSNEMAKVDDSFFHRLEESFLVEEDKKHERHPIFGNIVDEVAYHE
KYPTIYHLRKKLVDSTDKADLRLIYLALAHMIKFRGHFLIEGDLNPDNSDVDKLFIQLVQTYNQLFEENPINAS
GVDAKAILSARLSKSRRLENLIAQLPGEKKNGLFGNLIALSLGLTPNFKSNFDLAEDAKLQLSKDTYDDDLDNL
LAQIGDQYADLFLAAKNLSDAILLSDILRVNTEITKAPLSASMIKRYDEHHQDLTLLKALVRQQLPEKYKEIFF
DQSKNGYAGYIDGGASQEEFYKFIKPILEKMDGTEELLVKLNREDLLRKQRTFDNGSIPHQIHLGELHAILRRQ
EDFYPFLKDNREKIEKILTFRIPYYVGPLARGNSRFAWMTRKSEETITPWNFEEVVDKGASAQSFIERMTNFDK
NLPNEKVLPKHSLLYEYFTVYNELTKVKYVTEGMRKPAFLSGEQKKAIVDLLFKTNRKVTVKQLKEDYFKKIEC
FDSVEISGVEDRFNASLGTYHDLLKIIKDKDFLDNEENEDILEDIVLTLTLFEDREMIEERLKTYAHLFDDKVM
KQLKRRRYTGWGRLSRKLINGIRDKQSGKTILDFLKSDGFANRNFMQLIHDDSLTFKEDIQKAQVSGQGDSLHE
HIANLAGSPAIKKGILQTVKVVDELVKVMGRHKPENIVIEMARENQTTQKGQKNSRERMKRIEEGIKELGSQIL
KEHPVENTQLQNEKLYLYYLQNGRDMYVDQELDINRLSDYDVDHIVPQSFLKDDSIDNKVLTRSDKNRGKSDNV
PSEEVVKKMKNYWRQLLNAKLITQRKFDNLTKAERGGLSELDKAGFIKRQLVETRQITKHVAQILDSRMNTKYD
ENDKLIREVKVITLKSKLVSDFRKDFQFYKVREINNYHHAHDAYLNAVVGTALIKKYPKLESEFVYGDYKVYDV
RKMIAKSEQEIGKATAKYFFYSNIMNFFKTEITLANGEIRKRPLIETNGETGEIVWDKGRDFATVRKVLSMPQV
NIVKKTEVQTGGFSKESILPKRNSDKLIARKKDWDPKKYGGFDSPTVAYSVLVVAKVEKGKSKKLKSVKELLGI
TIMERSSFEKNPIDFLEAKGYKEVKKDLIIKLPKYSLFELENGRKRMLASAGELQKGNELALPSKYVNFLYLAS
HYEKLKGSPEDNEQKQLFVEQHKHYLDEIIEQISEFSKRVILADANLDKVLSAYNKHRDKPIREQAENIIHLFT
LTNLGAPAAFKYFDTTIDRKRYTSTKEVLDATLIHQSITGLYETRIDLSQLGGDSGGSPKKKRKV
pNMG-623 amino acid sequence: ecTadA_{(wild-type)}-32 a.a. linker-
ecTadA_{(W23L}_H36L_P48A_R51L_L84F_A106V_D108N_H123Y S146C_D147Y_R152P_E155V_I156F_K157N)-24 a.a.
linker_nCas9_GGS_NLS
(SEQ ID NO: 581)
MSEVEFSHEYWMRHALTLAKRAWDEREVPVGAVLVHNNRVIGEGWNRPIGRHDPTAHAEIMALRQGGLVMQNYR
LIDATLYVTLEPCVMCAGAMIHSRIGRVVFGARDAKTGAAGSLMDVLHHPGMNHRVEITEGILADECAALLSDF
FRMRRQEIKAQKKAQSSTDSGGSSGGSSGSETPGTSESATPESSGGSSGGSSEVEFSHEYWMRHALTLAKRALD
EREVPVGAVLVLNNRVIGEGWNRAIGLHDPTAHAEIMALRQGGLVMQNYRLIDATLYVTFEPCVMCAGAMIHSR
IGRVVFGVRNAKTGAAGSLMDVLHYPGMNHRVEITEGILADECAALLCYFFRMPRQVFNAQKKAQSSTDSGGSS
GGSSGSETPGTSESATPESDKKYSIGLAIGTNSVGWAVITDEYKVPSKKFKVLGNTDRHSIKKNLIGALLFDSG
ETAEATRLKRTARRRYTRRKNRICYLQEIFSNEMAKVDDSFFHRLEESFLVEEDKKHERHPIFGNIVDEVAYHE
KYPTIYHLRKKLVDSTDKADLRLIYLALAHMIKFRGHFLIEGDLNPDNSDVDKLFIQLVQTYNQLFEENPINAS
GVDAKAILSARLSKSRRLENLIAQLPGEKKNGLFGNLIALSLGLTPNFKSNFDLAEDAKLQLSKDTYDDDLDNL
LAQIGDQYADLFLAAKNLSDAILLSDILRVNTEITKAPLSASMIKRYDEHHQDLTLLKALVRQQLPEKYKEIFF
DQSKNGYAGYIDGGASQEEFYKFIKPILEKMDGTEELLVKLNREDLLRKQRTFDNGSIPHQIHLGELHAILRRQ
EDFYPFLKDNREKIEKILTFRIPYYVGPLARGNSRFAWMTRKSEETITPWNFEEVVDKGASAQSFIERMTNFDK
NLPNEKVLPKHSLLYEYFTVYNELTKVKYVTEGMRKPAFLSGEQKKAIVDLLFKTNRKVTVKQLKEDYFKKIEC
FDSVEISGVEDRFNASLGTYHDLLKIIKDKDFLDNEENEDILEDIVLTLTLFEDREMIEERLKTYAHLFDDKVM
KQLKRRRYTGWGRLSRKLINGIRDKQSGKTILDFLKSDGFANRNFMQLIHDDSLTFKEDIQKAQVSGQGDSLHE
HIANLAGSPAIKKGILQTVKVVDELVKVMGRHKPENIVIEMARENQTTQKGQKNSRERMKRIEEGIKELGSQIL
KEHPVENTQLQNEKLYLYYLQNGRDMYVDQELDINRLSDYDVDHIVPQSFLKDDSIDNKVLTRSDKNRGKSDNV
PSEEVVKKMKNYWRQLLNAKLITQRKFDNLTKAERGGLSELDKAGFIKRQLVETRQITKHVAQILDSRMNTKYD
ENDKLIREVKVITLKSKLVSDFRKDFQFYKVREINNYHHAHDAYLNAVVGTALIKKYPKLESEFVYGDYKVYDV
RKMIAKSEQEIGKATAKYFFYSNIMNFFKTEITLANGEIRKRPLIETNGETGEIVWDKGRDFATVRKVLSMPQV
NIVKKTEVQTGGFSKESILPKRNSDKLIARKKDWDPKKYGGFDSPTVAYSVLVVAKVEKGKSKKLKSVKELLGI
TIMERSSFEKNPIDFLEAKGYKEVKKDLIIKLPKYSLFELENGRKRMLASAGELQKGNELALPSKYVNFLYLAS
HYEKLKGSPEDNEQKQLFVEQHKHYLDEIIEQISEFSKRVILADANLDKVLSAYNKHRDKPIREQAENIIHLFT
LTNLGAPAAFKYFDTTIDRKRYTSTKEVLDATLIHQSITGLYETRIDLSQLGGDSGGSPKKKRKV
ABE6.3: ecTadA_{(wild-type)}-(SGGS)₂-XTEN-(SGGS)₂-
ecTadA_{(H36L}_P48S_R51L_L84F_A106V_D108N_H123Y_S146C_D147Y_E155V_I156F_K157N)-(SGGS)₂-XTEN-
(SGGS)₂_nCas9_SGGS_NLS
(SEQ ID NO: 582)
MSEVEFSHEYWMRHALTLAKRAWDEREVPVGAVLVHNNRVIGEGWNRPIGRHDPTAHAEIMALRQGGLVMQNY
RLIDATLYVTLEPCVMCAGAMIHSRIGRVVFGARDAKTGAAGSLMDVLHHPGMNHRVEITEGILADECAALLS
DFFRMRRQEIKAQKKAQSSTDSGGSSGGSSGSETPGTSESATPESSGGSSGGSSEVEFSHEYWMRHALTLAKR
AWDEREVPVGAVLVLNNRVIGEGWNRSIGLHDPTAHAEIMALRQGGLVMQNYRLIDATLYVTFEPCVMCAGAM
IHSRIGRVVFGVRNAKTGAAGSLMDVLHYPGMNHRVEITEGILADECAALLCYFFRMRRQVFNAQKKAQSSTD
SGGSSGGSSGSETPGTSESATPESSGGSSGGSDKKYSIGLAIGTNSVGWAVITDEYKVPSKKFKVLGNTDRHS
IKKNLIGALLFDSGETAEATRLKRTARRRYTRRKNRICYLQEIFSNEMAKVDDSFFHRLEESFLVEEDKKHER
HPIFGNIVDEVAYHEKYPTIYHLRKKLVDSTDKADLRLIYLALAHMIKFRGHFLIEGDLNPDNSDVDKLFIQL
VQTYNQLFEENPINASGVDAKAILSARLSKSRRLENLIAQLPGEKKNGLFGNLIALSLGLTPNFKSNFDLAED
AKLQLSKDTYDDDLDNLLAQIGDQYADLFLAAKNLSDAILLSDILRVNTEITKAPLSASMIKRYDEHHQDLTL
LKALVRQQLPEKYKEIFFDQSKNGYAGYIDGGASQEEFYKFIKPILEKMDGTEELLVKLNREDLLRKQRTFDN
GSIPHQIHLGELHAILRRQEDFYPFLKDNREKIEKILTFRIPYYVGPLARGNSRFAWMTRKSEETITPWNFEE
VVDKGASAQSFIERMTNFDKNLPNEKVLPKHSLLYEYFTVYNELTKVKYVTEGMRKPAFLSGEQKKAIVDLLF
KTNRKVTVKQLKEDYFKKIECFDSVEISGVEDRFNASLGTYHDLLKIIKDKDFLDNEENEDILEDIVLTLTLF
EDREMIEERLKTYAHLFDDKVMKQLKRRRYTGWGRLSRKLINGIRDKQSGKTILDFLKSDGFANRNFMQLIHD
DSLTFKEDIQKAQVSGQGDSLHEHIANLAGSPAIKKGILQTVKVVDELVKVMGRHKPENIVIEMARENQTTQK
GQKNSRERMKRIEEGIKELGSQILKEHPVENTQLQNEKLYLYYLQNGRDMYVDQELDINRLSDYDVDHIVPQS
FLKDDSIDNKVLTRSDKNRGKSDNVPSEEVVKKMKNYWRQLLNAKLITQRKFDNLTKAERGGLSELDKAGFIK
RQLVETRQITKHVAQILDSRMNTKYDENDKLIREVKVITLKSKLVSDFRKDFQFYKVREINNYHHAHDAYLNA
VVGTALIKKYPKLESEFVYGDYKVYDVRKMIAKSEQEIGKATAKYFFYSNIMNFFKTEITLANGEIRKRPLIE
TNGETGEIVWDKGRDFATVRKVLSMPQVNIVKKTEVQTGGFSKESILPKRNSDKLIARKKDWDPKKYGGFDSP
TVAYSVLVVAKVEKGKSKKLKSVKELLGITIMERSSFEKNPIDFLEAKGYKEVKKDLIIKLPKYSLFELENGR
KRMLASAGELQKGNELALPSKYVNFLYLASHYEKLKGSPEDNEQKQLFVEQHKHYLDEIIEQISEFSKRVILA
DANLDKVLSAYNKHRDKPIREQAENIIHLFTLTNLGAPAAFKYFDTTIDRKRYTSTKEVLDATLIHQSITG
LYETRIDLSQLGGDSGGSPKKKRKV
ABE6.4: ecTadA_{(wild-type)}-(SGGS)₂-XTEN-(SGGS)₂-
ecTadA_{(H36L}_P48S_R51L_L84F_A106V_D108N_H123Y_A142N_S146C_D147Y_E155V_I156F_K157N)-(SGGS)₂-
XTEN-(SGGS)₂_nCas9_SGGS _NLS
(SEQ ID NO: 583)
MSEVEFSHEYWMRHALTLAKRAWDEREVPVGAVLVHNNRVIGEGWNRPIGRHDPTAHAEIMALRQGGLVMQNY
RLIDATLYVTLEPCVMCAGAMIHSRIGRVVFGARDAKTGAAGSLMDVLHHPGMNHRVEITEGILADECAALLS
DFFRMRRQEIKAQKKAQSSTDSGGSSGGSSGSETPGTSESATPESSGGSSGGSSEVEFSHEYWMRHALTLAKR
AWDEREVPVGAVLVLNNRVIGEGWNRSIGLHDPTAHAEIMALRQGGLVMQNYRLIDATLYVTFEPCVMCAGAM
IHSRIGRVVFGVRNAKTGAAGSLMDVLHYPGMNHRVEITEGILADECNALLCYFFRMRRQVFNAQKKAQSSTD
SGGSSGGSSGSETPGTSESATPESSGGSSGGSDKKYSIGLAIGTNSVGWAVITDEYKVPSKKFKVLGNTDRHS
IKKNLIGALLFDSGETAEATRLKRTARRRYTRRKNRICYLQEIFSNEMAKVDDSFFHRLEESFLVEEDKKHER
HPIFGNIVDEVAYHEKYPTIYHLRKKLVDSTDKADLRLIYLALAHMIKFRGHFLIEGDLNPDNSDVDKLFIQL
VQTYNQLFEENPINASGVDAKAILSARLSKSRRLENLIAQLPGEKKNGLFGNLIALSLGLTPNFKSNFDLAED
AKLQLSKDTYDDDLDNLLAQIGDQYADLFLAAKNLSDAILLSDILRVNTEITKAPLSASMIKRYDEHHQDLTL
LKALVRQQLPEKYKEIFFDQSKNGYAGYIDGGASQEEFYKFIKPILEKMDGTEELLVKLNREDLLRKQRTFDN
GSIPHQIHLGELHAILRRQEDFYPFLKDNREKIEKILTFRIPYYVGPLARGNSRFAWMTRKSEETITPWNFEE
VVDKGASAQSFIERMTNFDKNLPNEKVLPKHSLLYEYFTVYNELTKVKYVTEGMRKPAFLSGEQKKAIVDLLF
KTNRKVTVKQLKEDYFKKIECFDSVEISGVEDRFNASLGTYHDLLKIIKDKDFLDNEENEDILEDIVLTLTLF
EDREMIEERLKTYAHLFDDKVMKQLKRRRYTGWGRLSRKLINGIRDKQSGKTILDFLKSDGFANRNFMQLIHD
DSLTFKEDIQKAQVSGQGDSLHEHIANLAGSPAIKKGILQTVKVVDELVKVMGRHKPENIVIEMARENQTTQK
GQKNSRERMKRIEEGIKELGSQILKEHPVENTQLQNEKLYLYYLQNGRDMYVDQELDINRLSDYDVDHIVPQS
FLKDDSIDNKVLTRSDKNRGKSDNVPSEEVVKKMKNYWRQLLNAKLITQRKFDNLTKAERGGLSELDKAGFIK
RQLVETRQITKHVAQILDSRMNTKYDENDKLIREVKVITLKSKLVSDFRKDFQFYKVREINNYHHAHDAYLNA
VVGTALIKKYPKLESEFVYGDYKVYDVRKMIAKSEQEIGKATAKYFFYSNIMNFFKTEITLANGEIRKRPLIE
TNGETGEIVWDKGRDFATVRKVLSMPQVNIVKKTEVQTGGFSKESILPKRNSDKLIARKKDWDPKKYGGFDSP
TVAYSVLVVAKVEKGKSKKLKSVKELLGITIMERSSFEKNPIDFLEAKGYKEVKKDLIIKLPKYSLFELENGR
KRMLASAGELQKGNELALPSKYVNFLYLASHYEKLKGSPEDNEQKQLFVEQHKHYLDEIIEQISEFSKRVILA
DANLDKVLSAYNKHRDKPIREQAENIIHLFTLTNLGAPAAFKYFDTTIDRKRYTSTKEVLDATLIHQSITG
LYETRIDLSQLGGDSGGSPKKKRKV
ABE7.8: ecTadA_{(wild-type)}-(SGGS)₂-XTEN-(SGGS)₂-
ecTadA_{(W23L}_H36L_P48A_R51L_L84F_A106V_D108N_H123Y_A142N_S146C_D147Y_E155V_I156F_K157N)-
(SGGS)₂-XTEN-(SGGS)₂_nCas9_SGGS_NLS
(SEQ ID NO: 584)
MSEVEFSHEYWMRHALTLAKRAWDEREVPVGAVLVHNNRVIGEGWNRPIGRHDPTAHAEIMALRQGGLVMQNY
RLIDATLYVTLEPCVMCAGAMIHSRIGRVVFGARDAKTGAAGSLMDVLHHPGMNHRVEITEGILADECAALLS
DFFRMRRQEIKAQKKAQSSTDSGGSSGGSSGSETPGTSESATPESSGGSSGGSSEVEFSHEYWMRHALTLAKR
ALDEREVPVGAVLVLNNRVIGEGWNRAIGLHDPTAHAEIMALRQGGLVMQNYRLIDATLYVTFEPCVMCAGAM
IHSRIGRVVFGVRNAKTGAAGSLMDVLHYPGMNHRVEITEGILADECNALLCYFFRMRRQVFNAQKKAQSSTD
SGGSSGGSSGSETPGTSESATPESSGGSSGGSDKKYSIGLAIGTNSVGWAVITDEYKVPSKKFKVLGNTDRHS
IKKNLIGALLFDSGETAEATRLKRTARRRYTRRKNRICYLQEIFSNEMAKVDDSFFHRLEESFLVEEDKKHER
HPIFGNIVDEVAYHEKYPTIYHLRKKLVDSTDKADLRLIYLALAHMIKFRGHFLIEGDLNPDNSDVDKLFIQL
VQTYNQLFEENPINASGVDAKAILSARLSKSRRLENLIAQLPGEKKNGLFGNLIALSLGLTPNFKSNFDLAED
AKLQLSKDTYDDDLDNLLAQIGDQYADLFLAAKNLSDAILLSDILRVNTEITKAPLSASMIKRYDEHHQDLTL
LKALVRQQLPEKYKEIFFDQSKNGYAGYIDGGASQEEFYKFIKPILEKMDGTEELLVKLNREDLLRKQRTFDN
GSIPHQIHLGELHAILRRQEDFYPFLKDNREKIEKILTFRIPYYVGPLARGNSRFAWMTRKSEETITPWNFEE
VVDKGASAQSFIERMTNFDKNLPNEKVLPKHSLLYEYFTVYNELTKVKYVTEGMRKPAFLSGEQKKAIVDLLF
KTNRKVTVKQLKEDYFKKIECFDSVEISGVEDRFNASLGTYHDLLKIIKDKDFLDNEENEDILEDIVLTLTLF
EDREMIEERLKTYAHLFDDKVMKQLKRRRYTGWGRLSRKLINGIRDKQSGKTILDFLKSDGFANRNFMQLIHD
DSLTFKEDIQKAQVSGQGDSLHEHIANLAGSPAIKKGILQTVKVVDELVKVMGRHKPENIVIEMARENQTTQK
GQKNSRERMKRIEEGIKELGSQILKEHPVENTQLQNEKLYLYYLQNGRDMYVDQELDINRLSDYDVDHIVPQS
FLKDDSIDNKVLTRSDKNRGKSDNVPSEEVVKKMKNYWRQLLNAKLITQRKFDNLTKAERGGLSELDKAGFIK
RQLVETRQITKHVAQILDSRMNTKYDENDKLIREVKVITLKSKLVSDFRKDFQFYKVREINNYHHAHDAYLNA
VVGTALIKKYPKLESEFVYGDYKVYDVRKMIAKSEQEIGKATAKYFFYSNIMNFFKTEITLANGEIRKRPLIE
TNGETGEIVWDKGRDFATVRKVLSMPQVNIVKKTEVQTGGFSKESILPKRNSDKLIARKKDWDPKKYGGFDSP
TVAYSVLVVAKVEKGKSKKLKSVKELLGITIMERSSFEKNPIDFLEAKGYKEVKKDLIIKLPKYSLFELENGR
KRMLASAGELQKGNELALPSKYVNFLYLASHYEKLKGSPEDNEQKQLFVEQHKHYLDEIIEQISEFSKRVILA
DANLDKVLSAYNKHRDKPIREQAENIIHLFTLTNLGAPAAFKYFDTTIDRKRYTSTKEVLDATLIHQSITGL
YETRIDLSQLGGDSGGSPKKKRKV
ABE7.9: ecTadA_{(wild-type)}-(SGGS)₂-XTEN-(SGGS)₂-
ecTadA_{(W23L}_H36L_P48A_R51L_L84F_A106V_D108N_H123Y_A142N_S146C_D147Y_R152P_E155V_I156F_K157N)-
(SGGS)₂-XTEN-(SGGS)₂_nCas9_SGGS_NLS
(SEQ ID NO: 585)
MSEVEFSHEYWMRHALTLAKRAWDEREVPVGAVLVHNNRVIGEGWNRPIGRHDPTAHAEIMALRQGGLVMQNY
RLIDATLYVTLEPCVMCAGAMIHSRIGRVVFGARDAKTGAAGSLMDVLHHPGMNHRVEITEGILADECAALLS
DFFRMRRQEIKAQKKAQSSTDSGGSSGGSSGSETPGTSESATPESSGGSSGGSSEVEFSHEYWMRHALTLAKR
ALDEREVPVGAVLVLNNRGEGWNRAIGLHDPTAHAEIMALRQGGLVMQNYRLIDATLYVTFEPCVMCAGAMIH
SRIGRVVFGVRNAKTGAAGSLMDVLHYPGMNHRVEITEGILADECNALLCYFFRMPRQVFNAQKKAQSSTDSG
GSSGGSSGSETPGTSESATPESSGGSSGGSDKKYSIGLAIGTNSVGWAVITDEYKVPSKKFKVLGNTDRHSIK
KNLIGALLFDSGETAEATRLKRTARRRYTRRKNRICYLQEIFSNEMAKVDDSFFHRLEESFLVEEDKKHERHP
IFGNIVDEVAYHEKYPTIYHLRKKLVDSTDKADLRLIYLALAHMIKFRGHFLIEGDLNPDNSDVDKLFIQLVQ
TYNQLFEENPINASGVDAKAILSARLSKSRRLENLIAQLPGEKKNGLFGNLIALSLGLTPNFKSNFDLAEDAK
LQLSKDTYDDDLDNLLAQIGDQYADLFLAAKNLSDAILLSDILRVNTEITKAPLSASMIKRYDEHHQDLTLLK
ALVRQQLPEKYKEIFFDQSKNGYAGYIDGGASQEEFYKFIKPILEKMDGTEELLVKLNREDLLRKQRTFDNGS
IPHQIHLGELHAILRRQEDFYPFLKDNREKIEKILTFRIPYYVGPLARGNSRFAWMTRKSEETITPWNFEEVV
DKGASAQSFIERMTNFDKNLPNEKVLPKHSLLYEYFTVYNELTKVKYVTEGMRKPAFLSGEQKKAIVDLLFKT
NRKVTVKQLKEDYFKKIECFDSVEISGVEDRFNASLGTYHDLLKIIKDKDFLDNEENEDILEDIVLTLTLFED
REMIEERLKTYAHLFDDKVMKQLKRRRYTGWGRLSRKLINGIRDKQSGKTILDFLKSDGFANRNFMQLIHDDS
LTFKEDIQKAQVSGQGDSLHEHIANLAGSPAIKKGILQTVKVVDELVKVMGRHKPENIVIEMARENQTTQKGQ
KNSRERMKRIEEGIKELGSQILKEHPVENTQLQNEKLYLYYLQNGRDMYVDQELDINRLSDYDVDHIVPQSFL
KDDSIDNKVLTRSDKNRGKSDNVPSEEVVKKMKNYWRQLLNAKLITQRKFDNLTKAERGGLSELDKAGFIKRQ
LVETRQITKHVAQILDSRMNTKYDENDKLIREVKVITLKSKLVSDFRKDFQFYKVREINNYHHAHDAYLNAVV
GTALIKKYPKLESEFVYGDYKVYDVRKMIAKSEQEIGKATAKYFFYSNIMNFFKTEITLANGEIRKRPLIETN
GETGEIVWDKGRDFATVRKVLSMPQVNIVKKTEVQTGGFSKESILPKRNSDKLIARKKDWDPKKYGGFDSPTV
AYSVLVVAKVEKGKSKKLKSVKELLGITIMERSSFEKNPIDFLEAKGYKEVKKDLIIKLPKYSLFELENGRKR
MLASAGELQKGNELALPSKYVNFLYLASHYEKLKGSPEDNEQKQLFVEQHKHYLDEIIEQISEFSKRVILADA
NLDKVLSAYNKHRDKPIREQAENIIHLFTLTNLGAPAAFKYFDTTIDRKRYTSTKEVLDATLIHQSITGLY
ETRIDLSQLGGDSGGSPKKKRKV
ABE7.10: ecTadA_{(wild-type)}-(SGGS)₂-XTEN-(SGGS)₂-
ecTadA_{(w23R}_H36L_P48A_R51L_L84F_A106V_D108N_H123Y_S146C_D147Y_R152P_E155V_I156F_K157N)-
(SGGS)₂-XTEN-(SGGS)₂_nCas9_SGGS_NLS
(SEQ ID NO: 586)
MSEVEFSHEYWMRHALTLAKRAWDEREVPVGAVLVHNNRVIGEGWNRPIGRHDPTAHAEIMALRQGGLVMQNY
RLIDATLYVTLEPCVMCAGAMIHSRIGRVVFGARDAKTGAAGSLMDVLHHPGMNHRVEITEGILADECAALLS
DFFRMRRQEIKAQKKAQSSTDSGGSSGGSSGSETPGTSESATPESSGGSSGGSSEVEFSHEYWMRHALTLAKR
ARDEREVPVGAVLVLNNRVIGEGWNRAIGLHDPTAHAEIMALRQGGLVMQNYRLIDATLYVTFEPCVMCAGAM
IHSRIGRVVFGVRNAKTGAAGSLMDVLHYPGMNHRVEITEGILADECAALLCYFFRMPRQVFNAQKKAQSSTD
SGGSSGGSSGSETPGTSESATPESSGGSSGGSDKKYSIGLAIGTNSVGWAVITDEYKVPSKKFKVLGNTDRHS
IKKNLIGALLFDSGETAEATRLKRTARRRYTRRKNRICYLQEIFSNEMAKVDDSFFHRLEESFLVEEDKKHER
HPIFGNIVDEVAYHEKYPTIYHLRKKLVDSTDKADLRLIYLALAHMIKFRGHFLIEGDLNPDNSDVDKLFIQL
VQTYNQLFEENPINASGVDAKAILSARLSKSRRLENLIAQLPGEKKNGLFGNLIALSLGLTPNFKSNFDLAED
AKLQLSKDTYDDDLDNLLAQIGDQYADLFLAAKNLSDAILLSDILRVNTEITKAPLSASMIKRYDEHHQDLTL
LKALVRQQLPEKYKEIFFDQSKNGYAGYIDGGASQEEFYKFIKPILEKMDGTEELLVKLNREDLLRKQRTFDN
GSIPHQIHLGELHAILRRQEDFYPFLKDNREKIEKILTFRIPYYVGPLARGNSRFAWMTRKSEETITPWNFEE
VVDKGASAQSFIERMTNFDKNLPNEKVLPKHSLLYEYFTVYNELTKVKYVTEGMRKPAFLSGEQKKAIVDLLF
KTNRKVTVKQLKEDYFKKIECFDSVEISGVEDRFNASLGTYHDLLKIIKDKDFLDNEENEDILEDIVLTLTLF
EDREMIEERLKTYAHLFDDKVMKQLKRRRYTGWGRLSRKLINGIRDKQSGKTILDFLKSDGFANRNFMQLIHD
DSLTFKEDIQKAQVSGQGDSLHEHIANLAGSPAIKKGILQTVKVVDELVKVMGRHKPENIVIEMARENQTTQK
GQKNSRERMKRIEEGIKELGSQILKEHPVENTQLQNEKLYLYYLQNGRDMYVDQELDINRLSDYDVDHIVPQS
FLKDDSIDNKVLTRSDKNRGKSDNVPSEEVVKKMKNYWRQLLNAKLITQRKFDNLTKAERGGLSELDKAGFIK
RQLVETRQITKHVAQILDSRMNTKYDENDKLIREVKVITLKSKLVSDFRKDFQFYKVREINNYHHAHDAYLNA
VVGTALIKKYPKLESEFVYGDYKVYDVRKMIAKSEQEIGKATAKYFFYSNIMNFFKTEITLANGEIRKRPLIE
TNGETGEIVWDKGRDFATVRKVLSMPQVNIVKKTEVQTGGFSKESILPKRNSDKLIARKKDWDPKKYGGFDSP
TVAYSVLVVAKVEKGKSKKLKSVKELLGITIMERSSFEKNPIDFLEAKGYKEVKKDLIIKLPKYSLFELENGR
KRMLASAGELQKGNELALPSKYVNFLYLASHYEKLKGSPEDNEQKQLFVEQHKHYLDEIIEQISEFSKRVILA
DANLDKVLSAYNKHRDKPIREQAENIIHLFTLTNLGAPAAFKYFDTTIDRKRYTSTKEVLDATLIHQSITGL
YETRIDLSQLGGDSGGSPKKKRKV

[0447] It should be appreciated that the fusion proteins of the present disclosure may comprise one or more additional features. For example, in some embodiments, the fusion protein may comprise cytoplasmic localization sequences, export sequences, such as nuclear export sequences, or other localization sequences, as well as sequence tags that are useful for solubilization, purification, or detection of the fusion proteins. Suitable protein tags provided herein include, but are not limited to, biotin carboxylase carrier protein (BCCP) tags, myc-tags, calmodulin-tags, FLAG-tags, hemagglutinin (HA)-tags, polyhistidine tags, also referred to as histidine tags or His-tags, maltose binding protein (MBP)-tags, nus-tags, glutathione-S-transferase (GST)-tags, green fluorescent protein (GFP)-tags, thioredoxin-tags, S-tags, Softags (e.g., Softag 1, Softag 3), strep-tags, biotin ligase tags, FlAsH tags, V5 tags, and SBP-tags. Additional suitable sequences will be apparent to those of ordinary skill in the art. In some embodiments, the fusion protein comprises one or more His tags.

[0448] Additional suitable strategies for generating fusion proteins comprising a napDNAbp (e.g., a Cas9 domain) and a nucleic acid editing domain (e.g., a deaminase domain) will be apparent to those of ordinary skill in the art based on this disclosure in combination with the general knowledge in the art. Suitable strategies for generating fusion proteins according to aspects of this disclosure using linkers or without the use of linkers will also be apparent to those of ordinary skill in the art in view of the instant disclosure and the knowledge in the art. For example, Gilbert et al., CRISPR-mediated modular RNA-guided regulation of transcription in eukaryotes. Cell. 2013; 154(2):442-51, showed that C-terminal fusions of Cas9 with VP64 using 2 NLS's as a linker (SPKKKRKVEAS, SEQ ID NO: 522), can be employed for transcriptional activation. Mali et al. (CAS9 transcriptional activators for target specificity screening and paired nickases for cooperative genome engineering. Nat Biotechnol. 2013; 31(9):833-8), reported that C-terminal fusions with VP64 without linker can be employed for transcriptional activation. And Maeder et al. (CRISPR RNA-guided activation of endogenous human genes. Nat Methods. 2013; 10: 977-979), reported that C-terminal fusions with VP64 using a Gly₄Ser (SEQ ID NO: 313) linker can be used as transcriptional activators. Recently, dCas9-FokI nuclease fusions have successfully been generated and exhibit improved enzymatic specificity as compared to the parental Cas9 enzyme (In Guilinger J P, Thompson D B, Liu D R. Fusion of catalytically inactive Cas9 to FokI nuclease improves the specificity of genome modification. Nat. Biotechnol. 2014; 32(6): 577-82; and in Tsai S Q, et al. Dimeric CRISPR RNA-guided FokI nucleases for highly specific genome editing. Nat Biotechnol. 2014; 32(6):569-76. PMID: 24770325 a SGSETPGTSESATPES (SEQ ID NO: 306) or a GGGGS (SEQ ID NO: 313) linker was used in FokI-dCas9 fusion proteins, respectively).

### EXAMPLES

[0449] In order that the invention described herein may be more fully understood, the following examples are set forth. The synthetic examples described in this application are offered to illustrate the compounds and methods provided herein and are not to be construed in any way as limiting their scope.

### Example 1: Cas9 Variant Sequences

[0450] The disclosure provides Cas9 variants, for example Cas9 proteins from one or more organisms, which may comprise one or more mutations (e.g., to generate dCas9 or Cas9 nickase). In some embodiments, one or more of the amino acid residues, identified below by an asterisk, of a Cas9 protein may be mutated. In some embodiments, the D10 and/or H840 residues of the amino acid sequence provided in SEQ ID NO: 10, or a corresponding mutation in any of the amino acid sequences provided in SEQ ID NOs: 11-260, are mutated. In some embodiments, the D10 residue of the amino acid sequence provided in SEQ ID NO: 10, or a corresponding mutation in any of the amino acid sequences provided in SEQ ID NOs: 11-260, is mutated to any amino acid residue, except for D. In some embodiments, the D10 residue of the amino acid sequence provided in SEQ ID NO: 10, or a corresponding mutation in any of the amino acid sequences provided in SEQ ID NOs: 11-260, is mutated to an A. In some embodiments, the H840 residue of the amino acid sequence provided in SEQ ID NO: 10, or a corresponding residue in any of the amino acid sequences provided in SEQ ID NOs: 11-260, is an H. In some embodiments, the H840 residue of the amino acid sequence provided in SEQ ID NO: 10, or a corresponding mutation in any of the amino acid sequences provided in SEQ ID NOs: 11-260, is mutated to any amino acid residue, except for H. In some embodiments, the H840 residue of the amino acid sequence provided in SEQ ID NO: 10, or a corresponding mutation in any of the amino acid sequences provided in SEQ ID NOs: 11-260, is mutated to an A. In some embodiments, the D10 residue of the amino acid sequence provided in SEQ ID NO: 10, or a corresponding residue in any of the amino acid sequences provided in SEQ ID NOs: 11-260, is a D.

[0451] A number of Cas9 sequences from various species were aligned to determine whether corresponding homologous amino acid residues of D10 and H840 of SEQ ID NO: 10 or SEQ ID NO: 11 can be identified in other Cas9 proteins, allowing the generation of Cas9 variants with corresponding mutations of the homologous amino acid residues. The alignment was carried out using the NCBI Constraint-based Multiple Alignment Tool (COBALT (accessible at st-va.ncbi.nlm.nih.gov/tools/cobalt), with the following parameters. Alignment parameters: Gap penalties −11, −1; End-Gap penalties −5, −1. CDD Parameters: Use RPS BLAST on; Blast E-value 0.003; Find Conserved columns and Recompute on. Query Clustering Parameters: Use query clusters on; Word Size 4; Max cluster distance 0.8; Alphabet Regular. An alignment of all homologous Cas9 proteins, allowing the generation of Cas9 variants with corresponding mutations of the homologous amino acid residues, is shown in, .e.g., Patent Publication No. WO2017/070632, published Apr. 27, 2017, entitled “Nucleobase editors and uses thereof”; which is incorporated by reference herein.

[0452] An exemplary alignment of four Cas9 sequences is provided below. The Cas9 sequences in the alignment are: Sequence 1 (S1): SEQ ID NO: 11|WP_010922251|gi 499224711|type II CRISPR RNA-guided endonuclease Cas9 [Streptococcus pyogenes]; Sequence 2 (S2): SEQ ID NO: 12|WP_039695303|gi 746743737|type II CRISPR RNA-guided endonuclease Cas9 [Streptococcus gallolyticus]; Sequence 3 (S3): SEQ ID NO: 13|WP_045635197|gi 782887988|type II CRISPR RNA-guided endonuclease Cas9 [Streptococcus mitis]; Sequence 4 (S4): SEQ ID NO: 14|5AXW_A|gi 924443546|Staphylococcus aureus Cas9. The HNH domain (bold and underlined) and the RuvC domain (boxed) are identified for each of the four sequences. Amino acid residues 10 and 840 in S1 and the homologous amino acids in the aligned sequences are identified with an asterisk following the respective amino acid residue.

| | | | |
|---|---|---|---|
| S1 | 1 | --MDKK-YSIGLD*IGTNSVGWAVITDEYKVPSKKFKVLGNTDRHSIKKNLI--GALLFDSG--ETAEATRLKRTARRRYT | 73 |
| S2 | 1 | --MTKKNYSIGLD*IGTNSVGWAVITDDYKVPAKKMKVLGNTDKKYIKKNLL--GALLFDSG--ETAEATRLKRTARRRYT | 74 |
| S3 | 1 | --M-KKGYSIGLD*IGTNSVGFAVITDDYKVPSKKMKVLGNTDKRFIKKNLI--GALLFDEG--TTAEARRLKRTARRRYT | 73 |
| S4 | 1 | GSHMKRNYILGLD*IGITSVGYGII--DYET-----------------RDVIDAGVRLFKEANVENNEGRRSKRGARRLKR | 61 |
| S1 | 74 | RRKNRICYLQEIFSNEMAKVDDSFEHRLEESFLVEEDKKHERHPIFGNIVDEVAYHEKYPTIYHLRKKLVDSTDKADLRL | 153 |
| S2 | 75 | RRKNRLRYLQEIFANEIAKVDESFFQRLDESFLTDDDKTFDSHPIFGNKAEEDAYHQKFPTIYHLRKHLADSSEKADLRL | 154 |
| S3 | 74 | RRKNRLRYLQEIFSEEMSKVDSSFFHRLDDSFLIPEDKRESKYPIFATLTEEKEYHKQFPTIYHLRKQLADSKEKTDLRL | 153 |
| S4 | 62 | RRRHRIQRVKKLL--------------FDYNLLTD--------------------HSELSGINPYEARVEGLSQXLSEEE | 107 |
| S1 | 154 | IYLALAHMIKFRGHFLIEGDLNPDNSDVDKLFIQLVQTYNQLFEENPINASGVDAKAILSARLSKSRRLENLIAQLPGEK | 233 |
| S2 | 155 | VYLALAHMIKFRGHFLIEGELNAENTDVQKIFADFVGVYNRTFDDSHLSEITVDVASILTEKISKSRRLENLIKYYPTEK | 234 |
| S3 | 154 | IYLALAHMIKYRGHFLYEEAFDIKNNDIQKIFNEFISIYDNTFEGSSLSGQNAQVEAIFTDKISKSAKRERVLKLFPDEK | 233 |
| S4 | 108 | FSAALLHLAKRRG----------------------VHNVNEVEEDT---------------------------------- | 131 |
| S1 | 234 | KNGLFGNLIALSLGLTPNFKSNFDLAEDAKLQLSKDTYDDDLDNLLAQIGDQYADLFLAAKNLSDAILLSDILRVNTEIT | 313 |
| S2 | 235 | KNTLFGNLIALALGLQPNFKTNFKLSEDAKLQFSKDTYEEDLEELLGKIGDDYADLFTSAKNLYDAILLSGILTVDDNST | 314 |
| S3 | 234 | STGLFSEFLKLIVGNQADFKKHFDLEDKAPLQFSKDTYDEDLENLLGQIGDDFTDLFVSAKKLYDAILLSGILTVTDPST | 313 |
| S4 | 132 | -----GNELS------------------THEQISRN-------------------------------------------- | 144 |
| S1 | 314 | KAPLSASMIKRYDEHHQDLTLLKALVRQQLPEKYKEIFFDQSKNGYAGYIDGGASQEEFYKFIKPILEKM--DGTEELLV | 391 |
| S2 | 315 | KAPLSASMIKRYVEHHEDLEKLKEFIKANKSELYHDIFKDKNKNGYAGYIENGVKQDEFYKYLKNILSKIKIDGSDYFLD | 394 |
| S3 | 314 | KAPLSASMIERYENHQNDLAALKQFIKNNLPEKYDEVFSDQSKDGYAGYIDGKTTQETFYKYIKNLLSKF--EGTDYFLD | 391 |
| S4 | 145 | ----SKALEEKYVAELQ-------------------------------------------------LERLKKDG------ | 165 |
| S1 | 392 | KLNREDLLRKQRTFDNGSIPHQIHLGELHAILRRQEDFYPFLKDNREKIEKILTFRIPYYVGPLARGNSRFAWMTRKSEE | 471 |
| S2 | 395 | KIEREDFLRKQRTFDNGSIPHQIHLQEMHAILRRQGDYYPFLKEKQDRIEKILTFRIPYYVGPLVRKDSRFAWAEYRSDE | 474 |
| S3 | 392 | KIEREDFLRKQRTFDNGSIPHQIHLQEMNAILRRQGEYYPFLKDNKEKIEKILTFRIPYYVGPLARGNRDFAWLTRNSDE | 471 |
| S4 | 166 | --EVRGSINRFKTSD--------YVKEAKQLLKVQKAYHQLDQSFIDTYIDLLETRRTYYEGP--GEGSPFGW------K | 227 |
| S1 | 472 | TITPWNFEEVVDKGASAQSFIERMTNFDKNLPNEKVLPKHSLLYEYFTVYNELTKVKYVTEGMRKPAFLSGEQKKAIVDL | 551 |
| S2 | 475 | KITPWNFDKVIDKEKSAEKFITRMTLNDLYLPEEKVLPKHSHVYETYAVYNELTKIKYVNEQGKE-SFFDSNMKQEIFDH | 553 |
| S3 | 472 | AIRPWNFEEIVDKASSAEDFINKMTNYDLYLPEEKVLPKHSLLYETFAVYNELTKVKFIAEGLRDYQFLDSGQKKQIVNQ | 551 |
| S4 | 228 | DIKEW---------------YEMLMGHCTYFPEELRSVKYAYNADLYNALNDLNNLVITRDENEK---LEYYEKFQIIEN | 289 |
| S1 | 552 | LFKTNRKVTVKQLKEDYFKKIECFDSVEISGVEDR---FNASLGTYHDLLKIIKDKDFLDNEENEDILEDIVLTLTLFED | 628 |
| S2 | 554 | VFKENRKVTKEKLLNYLNKEFPEYRIKDLIGLDKENKSFNASLGTYHDLKKIL-DKAFLDDKVNEEVIEDIIKTLTLFED | 632 |
| S3 | 552 | LFKENRKVTEKDIIHYLHN-VDGYDGIELKGIEKQ---FNASLSTYHDLLKIIKDKEFMDDAKNEAILENIVHTLTIFED | 627 |
| S4 | 290 | VFKQKKKPTLKQIAKEILVNEEDIKGYRVTSTGKPEF---TNLKVYHDIKDITARKEII---ENAELLDQIAKILTIYQS | 363 |
| S1 | 629 | REMIEERLKTYAHLFDDKVMKQLKR-RRYTGWGRLSRKLINGIRDKQSGKTILDFLKSDGFANRNFMQLIHDDSLTFKED | 707 |
| S2 | 633 | KDMIHERLQKYSDIFTANQLKKLER-RHYTGWGRLSYKLINGIRNKENNKTILDYLIDDGSANRNFMQLINDDTLPFKQI | 711 |
| S3 | 628 | REMIKQRLAQYDSLFDEKVIKALTR-RHYTGWGKLSAKLINGICDKQTGNTILDYLIDDGKINRNFMQLINDDGLSFKEI | 706 |
| S4 | 364 | SEDIQEELTNLNSELTQEEIEQISNLKGYTGTHNLSLKAINLILDE------LWHTNDNQIAIFNRLKLVP--------- | 428 |
| S1 | 708 | [chemical structure] | 781 |
| S2 | 712 | [chemical structure] | 784 |
| S3 | 707 | [chemical structure] | 779 |
| S4 | 429 | [chemical structure] | 505 |
| S1 | 782 | KRIEEGIKELGSQIL-------KEHPVENTQLQNEKLYLYYLQNGRDMYVDQELDINRLSD----YDVDH*IVPQSFLKDD | 850 |
| S2 | 785 | KKLQNSLKELGSNILNEEKPSYIEDKVENSHLQNDQLFLYYIQNGKDMYTGDELDIDHLSD----YDIDH*IIPQAFIKDD | 860 |
| S3 | 780 | KRIEDSLKILASGL---DSNILKENPTDNNQLQNDRLFLYYLQNGKDMYTGEALDINQLSS----YDIDH*IIPQAFIKDD | 852 |
| S4 | 506 | ERIEEIIRTTGK---------------ENAKYLIEKIKLHDMQEGKCLYSLEAIPLEDLLNNPFNYEVDH*IIPRSVSFDN | 570 |
| S1 | 851 | [chemical structure] | 922 |
| S2 | 861 | [chemical structure] | 932 |
| S3 | 853 | [chemical structure] | 924 |
| S4 | 571 | [chemical structure] | 650 |
| S1 | 923 | [chemical structure] | 1002 |
| S2 | 933 | [chemical structure] | 1012 |
| S3 | 925 | [chemical structure] | 1004 |
| S4 | 651 | [chemical structure] | 712 |
| S1 | 1003 | [chemical structure] | 1077 |
| S2 | 1013 | [chemical structure] | 1083 |
| S3 | 1005 | [chemical structure] | 1081 |
| S4 | 713 | [chemical structure] | 764 |
| S1 | 1078 | [chemical structure] | 1149 |
| S2 | 1084 | [chemical structure] | 1158 |
| S3 | 1082 | [chemical structure] | 1156 |
| S4 | 765 | [chemical structure] | 835 |
| S1 | 1150 | EKGKSKKLKSVKELLGITIMERSSFEKNPI-DFLEAKG-----YKEVKKDLIIKLPKYSLFELENGRKRMLASAGELQKG | 1223 |
| S2 | 1159 | EKGKAKKLKTVKELVGISIMERSFFEENPV-EFLENKG-----YHNIREDKLIKLPKYSLFEFEGGRRRLLASASELQKG | 1232 |
| S3 | 1157 | EKGKAKKLKTVKTLVGITIMEKAAFEENPI-TFLENKG-----YHNVRKENILCLPKYSLFELENGRRRLLASAKELQKG | 1230 |
| S4 | 836 | DPQTYQKLK--------LIMEQYGDEKNPLYKYYEETGNYLTKYSKKDNGPVIKKIKYYGNKLNAHLDITDDYPNSRNKV | 907 |
| S1 | 1224 | NELALPSKYVNFLYLASHYEKLKGSPEDNEQKQLFVEQHKHYLDEIIEQISEFSKRVILADANLDKVLSAYNKH------ | 1297 |
| S2 | 1233 | NEMVLPGYLVELLYHAHRADNF-----NSTEYLNYVSEHKKEFEKVLSCVEDFANLYVDVEKNLSKIRAVADSM------ | 1301 |
| S3 | 1231 | NEIVLPVYLTTLLYHSKNVHKL-----DEPGHLEYIQKHRNEFKDLLNLVSEFSQKYVLADANLEKIKSLYADN------ | 1299 |
| S4 | 908 | VKLSLKPYRFD-VYLDNGVYKFV-----TVKNLDVIK--KENYYEVNSKAYEEAKKLKKISNQAEFIASFYNNDLIKING | 979 |
| S1 | 1298 | RDKPIREQAENIIHLFTLTNLGAPAAFKYFDTTIDRKRYTSTKEVLDATLIHQSIT--------GLYETRI----DLSQL | 1365 |
| S2 | 1302 | DNFSIEEISNSFINLLTLTALGAPADFNFLGEKIPRKRYTSTKECLNATLIHQSIT--------GLYETRI----DLSEL | 1369 |
| S3 | 1300 | EQADIEILANSFINLLTFTALGAPAAFKFFGKDIDRKRYTTVSEILNATLIHQSIT--------GLYETWI----DLSEL | 1367 |
| S4 | 980 | ELYRVIGVNNDLLNRIEVNMIDITYR-EYLENMNDKRPPRIIKTIASKT---QSIKKYSTDILGNLYEVKSKKHPQIIKK | 1055 |
| S1 | 1366 | GGD | 1368 |
| S2 | 1370 | GEE | 1372 |
| S3 | 1368 | GED | 1370 |
| S4 | 1056 | G-- | 1056 |

[0453] The alignment demonstrates that amino acid sequences and amino acid residues that are homologous to a reference Cas9 amino acid sequence or amino acid residue can be identified across Cas9 sequence variants, including, but not limited to Cas9 sequences from different species, by identifying the amino acid sequence or residue that aligns with the reference sequence or the reference residue using alignment programs and algorithms known in the art. This disclosure provides Cas9 variants in which one or more of the amino acid residues identified by an asterisk in SEQ ID NOs: 11-14 (e.g., S1, S2, S3, and S4, respectively) are mutated as described herein. The residues D10 and H840 in Cas9 of SEQ ID NO: 10 that correspond to the residues identified in SEQ ID NOs: 11-14 by an asterisk are referred to herein as “homologous” or “corresponding” residues. Such homologous residues can be identified by sequence alignment, e.g., as described above, and by identifying the sequence or residue that aligns with the reference sequence or residue. Similarly, mutations in Cas9 sequences that correspond to mutations identified in SEQ ID NO: 10 herein, e.g., mutations of residues 10, and 840 in SEQ ID NO: 10, are referred to herein as “homologous” or “corresponding” mutations. For example, the mutations corresponding to the D10A mutation in SEQ ID NO: 10 or S1 (SEQ ID NO: 11) for the four aligned sequences above are D11A for S2, D10A for S3, and D13A for S4; the corresponding mutations for H840A in SEQ ID NO: 10 or S1 (SEQ ID NO: 11) are H850A for S2, H842A for S3, and H560A for S4.

[0454] A total of 250 Cas9 sequences (SEQ ID NOs: 11-260) from different species were aligned using the same algorithm and alignment parameters outlined above, and is shown in e.g., Patent Publication No. WO2017/070632, published Apr. 27, 2017, entitled “Nucleobase editors and uses thereof”; which is incorporated by reference herein.

WP_010922251.1
SEQ ID NO: 11
type II CRISPR RNA-guided endonuclease Cas9 [Streptococcus pyogenes]
WP_039695303.1
SEQ ID NO: 12
type II CRISPR RNA-guided endonuclease Cas9 [Streptococcus gallolyticus]
WP_045635197.1
SEQ ID NO: 13
type II CRISPR RNA-guided endonuclease Cas9 [Streptococcus mitis]
5AXW_A
SEQ ID NO: 14
Cas9, Chain A, Crystal Structure [Staphylococcus Aureus]
WP_009880683.1
SEQ ID NO: 15
type II CRISPR RNA-guided endonuclease Cas9 [Streptococcus pyogenes]
WP_010922251.1
SEQ ID NO: 16
type II CRISPR RNA-guided endonuclease Cas9 [Streptococcus pyogenes]
WP_011054416.1
SEQ ID NO: 17
type II CRISPR RNA-guided endonuclease Cas9 [Streptococcus pyogenes]
WP_011284745.1
SEQ ID NO: 18
type II CRISPR RNA-guided endonuclease Cas9 [Streptococcus pyogenes]
WP_011285506.1
SEQ ID NO: 19
type II CRISPR RNA-guided endonuclease Cas9 [Streptococcus pyogenes]
WP_011527619.1
SEQ ID NO: 20
type II CRISPR RNA-guided endonuclease Cas9 [Streptococcus pyogenes]
WP_012560673.1
SEQ ID NO: 21
type II CRISPR RNA-guided endonuclease Cas9 [Streptococcus pyogenes]
WP_014407541.1
SEQ ID NO: 22
type II CRISPR RNA-guided endonuclease Cas9 [Streptococcus pyogenes]
WP_020905136.1
SEQ ID NO: 23
type II CRISPR RNA-guided endonuclease Cas9 [Streptococcus pyogenes]
WP_023080005.1
SEQ ID NO: 24
type II CRISPR RNA-guided endonuclease Cas9 [Streptococcus pyogenes]
WP_023610282.1
SEQ ID NO: 25
type II CRISPR RNA-guided endonuclease Cas9 [Streptococcus pyogenes]
WP_030125963.1
SEQ ID NO: 26
type II CRISPR RNA-guided endonuclease Cas9 [Streptococcus pyogenes]
WP_030126706.1
SEQ ID NO: 27
type II CRISPR RNA-guided endonuclease Cas9 [Streptococcus pyogenes]
WP_031488318.1
SEQ ID NO: 28
type II CRISPR RNA-guided endonuclease Cas9 [Streptococcus pyogenes]
WP_032460140.1
SEQ ID NO: 29
type II CRISPR RNA-guided endonuclease Cas9 [Streptococcus pyogenes]
WP_032461047.1
SEQ ID NO: 30
type II CRISPR RNA-guided endonuclease Cas9 [Streptococcus pyogenes]
WP_032462016.1
SEQ ID NO: 31
type II CRISPR RNA-guided endonuclease Cas9 [Streptococcus pyogenes]
WP_032462936.1
SEQ ID NO: 32
type II CRISPR RNA-guided endonuclease Cas9 [Streptococcus pyogenes]
WP_032464890.1
SEQ ID NO: 33
type II CRISPR RNA-guided endonuclease Cas9 [Streptococcus pyogenes]
WP_033888930.1
SEQ ID NO: 34
type II CRISPR RNA-guided endonuclease Cas9 [Streptococcus pyogenes]
WP_038431314.1
SEQ ID NO: 35
type II CRISPR RNA-guided endonuclease Cas9 [Streptococcus pyogenes]
WP_038432938.1
SEQ ID NO: 36
type II CRISPR RNA-guided endonuclease Cas9 [Streptococcus pyogenes]
WP_038434062.1
SEQ ID NO: 37
type II CRISPR RNA-guided endonuclease Cas9 [Streptococcus pyogenes]
BAQ51233.1
SEQ ID NO: 38
CRISPR-associated protein, Csn1 family [Streptococcus pyogenes]
KGE60162.1
SEQ ID NO: 39
hypothetical protein MGAS2111_0903 [Streptococcus pyogenes MGAS2111]
KGE60856.1
SEQ ID NO: 40
CRISPR-associated endonuclease protein [Streptococcus pyogenes SS1447]
WP_002989955.1
SEQ ID NO: 41
MULTISPECIES: type II CRISPR RNA-guided endonuclease Cas9 [Streptococcus]
WP_003030002.1
SEQ ID NO: 42
MULTISPECIES: type II CRISPR RNA-guided endonuclease Cas9 [Streptococcus]
WP_003065552.1
SEQ ID NO: 43
MULTISPECIES: type II CRISPR RNA-guided endonuclease Cas9 [Streptococcus]
WP_001040076.1
SEQ ID NO: 44
type II CRISPR RNA-guided endonuclease Cas9 [Streptococcus agalactiae]
WP_001040078.1
SEQ ID NO: 45
type II CRISPR RNA-guided endonuclease Cas9 [Streptococcus agalactiae]
WP_001040080.1
SEQ ID NO: 46
type II CRISPR RNA-guided endonuclease Cas9 [Streptococcus agalactiae]
WP_001040081.1
SEQ ID NO: 47
type II CRISPR RNA-guided endonuclease Cas9 [Streptococcus agalactiae]
WP_001040083.1
SEQ ID NO: 48
type II CRISPR RNA-guided endonuclease Cas9 [Streptococcus agalactiae]
WP_001040085.1
SEQ ID NO: 49
type II CRISPR RNA-guided endonuclease Cas9 [Streptococcus agalactiae]
WP_001040087.1
SEQ ID NO: 50
type II CRISPR RNA-guided endonuclease Cas9 [Streptococcus agalactiae]
WP_001040088.1
SEQ ID NO: 51
type II CRISPR RNA-guided endonuclease Cas9 [Streptococcus agalactiae]
WP_001040089.1
SEQ ID NO: 52
type II CRISPR RNA-guided endonuclease Cas9 [Streptococcus agalactiae]
WP_001040090.1
SEQ ID NO: 53
type II CRISPR RNA-guided endonuclease Cas9 [Streptococcus agalactiae]
WP_001040091.1
SEQ ID NO: 54
type II CRISPR RNA-guided endonuclease Cas9 [Streptococcus agalactiae]
WP_001040092.1
SEQ ID NO: 55
type II CRISPR RNA-guided endonuclease Cas9 [Streptococcus agalactiae]
WP_001040094.1
SEQ ID NO: 56
type II CRISPR RNA-guided endonuclease Cas9 [Streptococcus agalactiae]
WP_001040095.1
SEQ ID NO: 57
type II CRISPR RNA-guided endonuclease Cas9 [Streptococcus agalactiae]
WP_001040096.1
SEQ ID NO: 58
type II CRISPR RNA-guided endonuclease Cas9 [Streptococcus agalactiae]
WP_001040097.1
SEQ ID NO: 59
type II CRISPR RNA-guided endonuclease Cas9 [Streptococcus agalactiae]
WP_001040098.1
SEQ ID NO: 60
type II CRISPR RNA-guided endonuclease Cas9 [Streptococcus agalactiae]
WP_001040099.1
SEQ ID NO: 61
type II CRISPR RNA-guided endonuclease Cas9 [Streptococcus agalactiae]
WP_001040100.1
SEQ ID NO: 62
type II CRISPR RNA-guided endonuclease Cas9 [Streptococcus agalactiae]
WP_001040104.1
SEQ ID NO: 63
type II CRISPR RNA-guided endonuclease Cas9 [Streptococcus agalactiae]
WP_001040105.1
SEQ ID NO: 64
type II CRISPR RNA-guided endonuclease Cas9 [Streptococcus agalactiae]
WP_001040106.1
SEQ ID NO: 65
type II CRISPR RNA-guided endonuclease Cas9 [Streptococcus agalactiae]
WP_001040107.1
SEQ ID NO: 66
type II CRISPR RNA-guided endonuclease Cas9 [Streptococcus agalactiae]
WP_001040108.1
SEQ ID NO: 67
type II CRISPR RNA-guided endonuclease Cas9 [Streptococcus agalactiae]
WP_001040109.1
SEQ ID NO: 68
type II CRISPR RNA-guided endonuclease Cas9 [Streptococcus agalactiae]
WP_001040110.1
SEQ ID NO: 69
type II CRISPR RNA-guided endonuclease Cas9 [Streptococcus agalactiae]
WP_015058523.1
SEQ ID NO: 70
type II CRISPR RNA-guided endonuclease Cas9 [Streptococcus agalactiae]
WP_017643650.1
SEQ ID NO: 71
type II CRISPR RNA-guided endonuclease Cas9 [Streptococcus agalactiae]
WP_017647151.1
SEQ ID NO: 72
type II CRISPR RNA-guided endonuclease Cas9 [Streptococcus agalactiae]
WP_017648376.1
SEQ ID NO: 73
type II CRISPR RNA-guided endonuclease Cas9 [Streptococcus agalactiae]
WP_017649527.1
SEQ ID NO: 74
type II CRISPR RNA-guided endonuclease Cas9 [Streptococcus agalactiae]
WP_017771611.1
SEQ ID NO: 75
type II CRISPR RNA-guided endonuclease Cas9 [Streptococcus agalactiae]
WP_017771984.1
SEQ ID NO: 76
type II CRISPR RNA-guided endonuclease Cas9 [Streptococcus agalactiae]
CFQ25032.1
SEQ ID NO: 77
CRISPR-associated protein [Streptococcus agalactiae]
CFV16040.1
SEQ ID NO: 78
CRISPR-associated protein [Streptococcus agalactiae]
KLJ37842.1
SEQ ID NO: 79
CRISPR-associated protein Csn1 [Streptococcus agalactiae]
KLJ72361.1
SEQ ID NO: 80
CRISPR-associated protein Csn1 [Streptococcus agalactiae]
KLL20707.1
SEQ ID NO: 81
CRISPR-associated protein Csn1 [Streptococcus agalactiae]
KLL42645.1
SEQ ID NO: 82
CRISPR-associated protein Csn1 [Streptococcus agalactiae]
WP_047207273.1
SEQ ID NO: 83
type II CRISPR RNA-guided endonuclease Cas9 [Streptococcus agalactiae]
WP_047209694.1
SEQ ID NO: 84
type II CRISPR RNA-guided endonuclease Cas9 [Streptococcus agalactiae]
WP_050198062.1
SEQ ID NO: 85
type II CRISPR RNA-guided endonuclease Cas9 [Streptococcus agalactiae]
WP_050201642.1
SEQ ID NO: 86
type II CRISPR RNA-guided endonuclease Cas9 [Streptococcus agalactiae]
WP_050204027.1
SEQ ID NO: 87
type II CRISPR RNA-guided endonuclease Cas9 [Streptococcus agalactiae]
WP_050881965.1
SEQ ID NO: 88
type II CRISPR RNA-guided endonuclease Cas9 [Streptococcus agalactiae]
WP_050886065.1
SEQ ID NO: 89
type II CRISPR RNA-guided endonuclease Cas9 [Streptococcus agalactiae]
AHN30376.1
SEQ ID NO: 90
CRISPR-associated protein Csn1 [Streptococcus agalactiae 138P]
EAO78426.1
SEQ ID NO: 91
reticulocyte binding protein [Streptococcus agalactiae H36B]
CCW42055.1
SEQ ID NO: 92
CRISPR-associated protein, SAG0894 family [Streptococcus agalactiae ILRI112]
WP_003041502.1
SEQ ID NO: 93
type II CRISPR RNA-guided endonuclease Cas9 [Streptococcus anginosus]
WP_037593752.1
SEQ ID NO: 94
type II CRISPR RNA-guided endonuclease Cas9 [Streptococcus anginosus]
WP_049516684.1
SEQ ID NO: 95
CRISPR-associated protein Csn1 [Streptococcus anginosus]
GAD46167.1
SEQ ID NO: 96
hypothetical protein ANG6_0662 [Streptococcus anginosus T5]
WP_018363470.1
SEQ ID NO: 97
type II CRISPR RNA-guided endonuclease Cas9 [Streptococcus caballi]
WP_003043819.1
SEQ ID NO: 98
type II CRISPR RNA-guided endonuclease Cas9 [Streptococcus canis]
WP_006269658.1
SEQ ID NO: 99
type II CRISPR RNA-guided endonuclease Cas9 [Streptococcus constellatus]
WP_048800889.1
SEQ ID NO: 100
type II CRISPR RNA-guided endonuclease Cas9 [Streptococcus constellatus]
WP_012767106.1
SEQ ID NO: 101
type II CRISPR RNA-guided endonuclease Cas9 [Streptococcus dysgalactiae]
WP_014612333.1
SEQ ID NO: 102
type II CRISPR RNA-guided endonuclease Cas9 [Streptococcus dysgalactiae]
WP_015017095.1
SEQ ID NO: 103
type II CRISPR RNA-guided endonuclease Cas9 [Streptococcus dysgalactiae]
WP_015057649.1
SEQ ID NO: 104
type II CRISPR RNA-guided endonuclease Cas9 [Streptococcus dysgalactiae]
WP_048327215.1
SEQ ID NO: 105
type II CRISPR RNA-guided endonuclease Cas9 [Streptococcus dysgalactiae]
WP_049519324.1
SEQ ID NO: 106
CRISPR-associated protein Csn1 [Streptococcus dysgalactiae]
WP_012515931.1
SEQ ID NO: 107
type II CRISPR RNA-guided endonuclease Cas9 [Streptococcus equi]
WP_021320964.1
SEQ ID NO: 108
type II CRISPR RNA-guided endonuclease Cas9 [Streptococcus equi]
WP_037581760.1
SEQ ID NO: 109
type II CRISPR RNA-guided endonuclease Cas9 [Streptococcus equi]
WP_004232481.1
SEQ ID NO: 110
type II CRISPR RNA-guided endonuclease Cas9 [Streptococcus equinus]
WP_009854540.1
SEQ ID NO: 111
type II CRISPR RNA-guided endonuclease Cas9 [Streptococcus gallolyticus]
WP_012962174.1
SEQ ID NO: 112
type II CRISPR RNA-guided endonuclease Cas9 [Streptococcus gallolyticus]
WP_039695303.1
SEQ ID NO: 113
type II CRISPR RNA-guided endonuclease Cas9 [Streptococcus gallolyticus]
WP_014334983.1
SEQ ID NO: 114
type II CRISPR RNA-guided endonuclease Cas9 [Streptococcus infantarius]
WP_003099269.1
SEQ ID NO: 115
type II CRISPR RNA-guided endonuclease Cas9 [Streptococcus iniae]
AHY15608.1
SEQ ID NO: 116
CRISPR-associated protein Csn1 [Streptococcus iniae]
AHY17476.1
SEQ ID NO: 117
CRISPR-associated protein Csn1 [Streptococcus iniae]
ESR09100.1
SEQ ID NO: 118
hypothetical protein IUSA1_08595 [Streptococcus iniae IUSA1]
AGM98575.1
SEQ ID NO: 119
CRISPR-associated protein Cas9/Csnl, subtype II/NMEMI
[Streptococcus iniae SF1]
ALF27331.1
SEQ ID NO: 120
CRISPR-associated protein Csn1 [Streptococcus intermedius]
WP_018372492.1
SEQ ID NO: 121
type II CRISPR RNA-guided endonuclease Cas9 [Streptococcus massiliensis]
WP_045618028.1
SEQ ID NO: 122
type II CRISPR RNA-guided endonuclease Cas9 [Streptococcus mitis]
WP_045635197.1
SEQ ID NO: 123
type II CRISPR RNA-guided endonuclease Cas9 [Streptococcus mitis]
WP_002263549.1
SEQ ID NO: 124
type II CRISPR RNA-guided endonuclease Cas9 [Streptococcus mutans]
WP_002263887.1
SEQ ID NO: 125
type II CRISPR RNA-guided endonuclease Cas9 [Streptococcus mutans]
WP_002264920.1
SEQ ID NO: 126
type II CRISPR RNA-guided endonuclease Cas9 [Streptococcus mutans]
WP_002269043.1
SEQ ID NO: 127
type II CRISPR RNA-guided endonuclease Cas9 [Streptococcus mutans]
WP_002269448.1
SEQ ID NO: 128
type II CRISPR RNA-guided endonuclease Cas9 [Streptococcus mutans]
WP_002271977.1
SEQ ID NO: 129
type II CRISPR RNA-guided endonuclease Cas9 [Streptococcus mutans]
WP_002272766.1
SEQ ID NO: 130
type II CRISPR RNA-guided endonuclease Cas9 [Streptococcus mutans]
WP_002273241.1
SEQ ID NO: 131
type II CRISPR RNA-guided endonuclease Cas9 [Streptococcus mutans]
WP_002275430.1
SEQ ID NO: 132
type II CRISPR RNA-guided endonuclease Cas9 [Streptococcus mutans]
WP_002276448.1
SEQ ID NO: 133
type II CRISPR RNA-guided endonuclease Cas9 [Streptococcus mutans]
WP_002277050.1
SEQ ID NO: 134
type II CRISPR RNA-guided endonuclease Cas9 [Streptococcus mutans]
WP_002277364.1
SEQ ID NO: 135
type II CRISPR RNA-guided endonuclease Cas9 [Streptococcus mutans]
WP_002279025.1
SEQ ID NO: 136
type II CRISPR RNA-guided endonuclease Cas9 [Streptococcus mutans]
WP_002279859.1
SEQ ID NO: 137
type II CRISPR RNA-guided endonuclease Cas9 [Streptococcus mutans]
WP_002280230.1
SEQ ID NO: 138
type II CRISPR RNA-guided endonuclease Cas9 [Streptococcus mutans]
WP_002281696.1
SEQ ID NO: 139
type II CRISPR RNA-guided endonuclease Cas9 [Streptococcus mutans]
WP_002282247.1
SEQ ID NO: 140
type II CRISPR RNA-guided endonuclease Cas9 [Streptococcus mutans]
WP_002282906.1
SEQ ID NO: 141
type II CRISPR RNA-guided endonuclease Cas9 [Streptococcus mutans]
WP_002283846.1
SEQ ID NO: 142
type II CRISPR RNA-guided endonuclease Cas9 [Streptococcus mutans]
WP_002287255.1
SEQ ID NO: 143
type II CRISPR RNA-guided endonuclease Cas9 [Streptococcus mutans]
WP_002288990.1
SEQ ID NO: 144
type II CRISPR RNA-guided endonuclease Cas9 [Streptococcus mutans]
WP_002289641.1
SEQ ID NO: 145
type II CRISPR RNA-guided endonuclease Cas9 [Streptococcus mutans]
WP_002290427.1
SEQ ID NO: 146
type II CRISPR RNA-guided endonuclease Cas9 [Streptococcus mutans]
WP_002295753.1
SEQ ID NO: 147
type II CRISPR RNA-guided endonuclease Cas9 [Streptococcus mutans]
WP_002296423.1
SEQ ID NO: 148
type II CRISPR RNA-guided endonuclease Cas9 [Streptococcus mutans]
WP_002304487.1
SEQ ID NO: 149
type II CRISPR RNA-guided endonuclease Cas9 [Streptococcus mutans]
WP_002305844.1
SEQ ID NO: 150
type II CRISPR RNA-guided endonuclease Cas9 [Streptococcus mutans]
WP_002307203.1
SEQ ID NO: 151
type II CRISPR RNA-guided endonuclease Cas9 [ Streptococcus mutans]
WP_002310390.1
SEQ ID NO: 152
type II CRISPR RNA-guided endonuclease Cas9 [Streptococcus mutans]
WP_002352408.1
SEQ ID NO: 153
type II CRISPR RNA-guided endonuclease Cas9 [Streptococcus mutans]
WP_012997688.1
SEQ ID NO: 154
type II CRISPR RNA-guided endonuclease Cas9 [Streptococcus mutans]
WP_014677909.1
SEQ ID NO: 155
type II CRISPR RNA-guided endonuclease Cas9 [Streptococcus mutans]
WP_019312892.1
SEQ ID NO: 156
type II CRISPR RNA-guided endonuclease Cas9 [Streptococcus mutans]
WP_019313659.1
SEQ ID NO: 157
type II CRISPR RNA-guided endonuclease Cas9 [Streptococcus mutans]
WP_019314093.1
SEQ ID NO: 158
type II CRISPR RNA-guided endonuclease Cas9 [Streptococcus mutans]
WP_019315370.1
SEQ ID NO: 159
type II CRISPR RNA-guided endonuclease Cas9 [Streptococcus mutans]
WP_019803776.1
SEQ ID NO: 160
type II CRISPR RNA-guided endonuclease Cas9 [Streptococcus mutans]
WP_019805234.1
SEQ ID NO: 161
type II CRISPR RNA-guided endonuclease Cas9 [Streptococcus mutans]
WP_024783594.1
SEQ ID NO: 162
type II CRISPR RNA-guided endonuclease Cas9 [Streptococcus mutans]
WP_024784288.1
SEQ ID NO: 163
type II CRISPR RNA-guided endonuclease Cas9 [Streptococcus mutans]
WP_024784666.1
SEQ ID NO: 164
type II CRISPR RNA-guided endonuclease Cas9 [Streptococcus mutans]
WP_024784894.1
SEQ ID NO: 165
type II CRISPR RNA-guided endonuclease Cas9 [ Streptococcus mutans]
WP_024786433.1
SEQ ID NO: 166
type II CRISPR RNA-guided endonuclease Cas9 [Streptococcus mutans]
WP_049473442.1
SEQ ID NO: 167
CRISPR-associated protein Csn1 [Streptococcus mutans]
WP_049474547.1
SEQ ID NO: 168
CRISPR-associated protein Csn1 [Streptococcus mutans]
EMC03581.1
SEQ ID NO: 169
hypothetical protein SMU69_09359 [Streptococcus mutans NLML4]
WP_000428612.1
SEQ ID NO: 170
type II CRISPR RNA-guided endonuclease Cas9 [Streptococcus oralis]
WP_000428613.1
SEQ ID NO: 171
type II CRISPR RNA-guided endonuclease Cas9 [Streptococcus oralis]
WP_049523028.1
SEQ ID NO: 172
CRISPR-associated protein Csn1 [Streptococcus parasanguinis]
WP_003107102.1
SEQ ID NO: 173
type II CRISPR RNA-guided endonuclease Cas9 [Streptococcus parauberis]
WP_054279288.1
SEQ ID NO: 174
type II CRISPR RNA-guided endonuclease Cas9 [Streptococcus phocae]
WP_049531101.1
SEQ ID NO: 175
CRISPR-associated protein Csn1 [Streptococcus pseudopneumoniae]
WP_049538452.1
SEQ ID NO: 176
CRISPR-associated protein Csn1 [Streptococcus pseudopneumoniae]
WP_049549711.1
SEQ ID NO: 177
CRISPR-associated protein Csn1 [Streptococcus pseudopneumoniae]
WP_007896501.1
SEQ ID NO: 178
type II CRISPR RNA-guided endonuclease Cas9 [Streptococcus pseudoporcinus]
EFR44625.1
SEQ ID NO: 179
CRISPR-associated protein, Csn1 family [Streptococcus pseudoporcinus SPIN 20026]
WP_002897477.1
SEQ ID NO: 180
type II CRISPR RNA-guided endonuclease Cas9 [Streptococcus sanguinis]
WP_002906454.1
SEQ ID NO: 181
type II CRISPR RNA-guided endonuclease Cas9 [Streptococcus sanguinis]
WP_009729476.1
SEQ ID NO: 182
type II CRISPR RNA-guided endonuclease Cas9 [Streptococcus sp. F0441]
CQR24647.1
SEQ ID NO: 183
CRISPR-associated protein [Streptococcus sp. FF10]
WP_000066813.1
SEQ ID NO: 184
type II CRISPR RNA-guided endonuclease Cas9 [Streptococcus sp. M334]
WP_009754323.1
SEQ ID NO: 185
type II CRISPR RNA-guided endonuclease Cas9 [Streptococcus sp. taxon 056]
WP_044674937.1
SEQ ID NO: 186
type II CRISPR RNA-guided endonuclease Cas9 [Streptococcus suis]
WP_044676715.1
SEQ ID NO: 187
type II CRISPR RNA-guided endonuclease Cas9 [Streptococcus suis]
WP_044680361.1
SEQ ID NO: 188
type II CRISPR RNA-guided endonuclease Cas9 [Streptococcus suis]
WP_044681799.1
SEQ ID NO: 189
type II CRISPR RNA-guided endonuclease Cas9 [Streptococcus suis]
WP_049533112.1
SEQ ID NO: 190
CRISPR-associated protein Csn1 [Streptococcus suis]
WP_029090905.1
SEQ ID NO: 191
type II CRISPR RNA-guided endonuclease Cas9 [Brochothrix thermosphacta]
WP_006506696.1
SEQ ID NO: 192
type II CRISPR RNA-guided endonuclease Cas9 [Catenibacterium mitsuokai]
AIT42264.1
SEQ ID NO: 193
Cas9hc: NLS: HA [Cloning vector pYB196]
WP_034440723.1
SEQ ID NO: 194
type II CRISPR endonuclease Cas9 [Clostridiales bacterium S5-A11]
AKQ21048.1
SEQ ID NO: 195
Cas9 [CRISPR-mediated gene targeting vector p(bhsp68-Cas9)]
WP_004636532.1
SEQ ID NO: 196
type II CRISPR RNA-guided endonuclease Cas9 [Dolosigranulum pigrum]
WP_002364836.1
SEQ ID NO: 197
MULTISPECIES: type II CRISPR RNA-guided endonuclease Cas9 [Enterococcus]
WP_016631044.1
SEQ ID ID 198
MULTISPECIES: type II CRISPR RNA-guided endonuclease Cas9 [Enterococcus]
EMS75795.1
SEQ ID NO: 199
[Enterococcus hypothetical protein H318_06676 [Enterococcus duransIPLA 655]
WP_002373311.1
SEQ ID NO: 200
type II CRISPR RNA-guided endonuclease Cas9 [Enterococcus faecalis]
WP_002378009.1
SEQ ID NO: 201
type II CRISPR RNA-guided endonuclease Cas9 [Enterococcus faecalis]
WP_002407324.1
SEQ ID NO: 202
type II CRISPR RNA-guided endonuclease Cas9 [Enterococcus faecalis]
WP_002413717.1
SEQ ID NO: 203
type II CRISPR RNA-guided endonuclease Cas9 [Enterococcus faecalis]
WP_010775580.1
SEQ ID NO: 204
type II CRISPR RNA-guided endonuclease Cas9 [Enterococcus faecalis]
WP_010818269.1
SEQ ID NO: 205
type II CRISPR RNA-guided endonuclease Cas9 [Enterococcus faecalis]
WP_010824395.1
SEQ ID NO: 206
type II CRISPR RNA-guided endonuclease Cas9 [Enterococcus faecalis]
WP_016622645.1
SEQ ID NO: 207
type II CRISPR RNA-guided endonuclease Cas9 [Enterococcus faecalis]
WP_033624816.1
SEQ ID NO: 208
type II CRISPR RNA-guided endonuclease Cas9 [Enterococcus faecalis]
WP_033625576.1
SEQ ID NO: 209
type II CRISPR RNA-guided endonuclease Cas9 [Enterococcus faecalis]
WP_033789179.1
SEQ ID NO: 210
type II CRISPR RNA-guided endonuclease Cas9 [Enterococcus faecalis]
WP_002310644.1
SEQ ID NO: 211
type II CRISPR RNA-guided endonuclease Cas9 [Enterococcus faecium]
WP_002312694.1
SEQ ID NO: 212
type II CRISPR RNA-guided endonuclease Cas9 [Enterococcus faecium]
WP_002314015.1
SEQ ID NO: 213
type II CRISPR RNA-guided endonuclease Cas9 [Enterococcus faecium]
WP_002320716.1
SEQ ID NO: 214
type II CRISPR RNA-guided endonuclease Cas9 [Enterococcus faecium]
WP_002330729.1
SEQ ID NO: 215
type II CRISPR RNA-guided endonuclease Cas9 [Enterococcus faecium]
WP_002335161.1
SEQ ID NO: 216
type II CRISPR RNA-guided endonuclease Cas9 [Enterococcus faecium]
WP_002345439.1
SEQ ID NO: 217
type II CRISPR RNA-guided endonuclease Cas9 [Enterococcus faecium]
WP_034867970.1
SEQ ID NO: 218
type II CRISPR RNA-guided endonuclease Cas9 [Enterococcus faecium]
WP_047937432.1
SEQ ID NO: 219
type II CRISPR RNA-guided endonuclease Cas9 [Enterococcus faecium]
WP_010720994.1
SEQ ID NO: 220
type II CRISPR RNA-guided endonuclease Cas9 [Enterococcus hirae]
WP_010737004.1
SEQ ID NO: 221
type II CRISPR RNA-guided endonuclease Cas9 [Enterococcus hirae]
WP_034700478.1
SEQ ID NO: 222
type II CRISPR RNA-guided endonuclease Cas9 [Enterococcus hirae]
WP_007209003.1
SEQ ID NO: 223
type II CRISPR RNA-guided endonuclease Cas9 [Enterococcus italicus]
WP_023519017.1
SEQ ID NO: 224
type II CRISPR RNA-guided endonuclease Cas9 [Enterococcus mundtii]
WP_010770040.1
SEQ ID NO: 225
type II CRISPR RNA-guided endonuclease Cas9 [Enterococcus phoeniculicola]
WP_048604708.1
SEQ ID NO: 226
type II CRISPR RNA-guided endonuclease Cas9 [Enterococcus sp. AM1]
WP_010750235.1
SEQ ID NO: 227
type II CRISPR RNA-guided endonuclease Cas9 [Enterococcus villorum]
AII16583.1
SEQ ID NO: 228
Cas9 endonuclease [Expression vector pCas9]
WP_029073316.1
SEQ ID NO: 229
type II CRISPR RNA-guided endonuclease Cas9 [Kandleria vitulina]
WP_031589969.1
SEQ ID NO: 230
type II CRISPR RNA-guided endonuclease Cas9 [Kandleria vitulina]
KDA45870.1
SEQ ID NO: 231
CRISPR-associated protein Cas9/Csn1, subtype II/NMEMI [Lactobacillus animalis]
WP_039099354.1
SEQ ID NO: 232
type II CRISPR RNA-guided endonuclease Cas9 [Lactobacillus curvatus]
AKP02966.1
SEQ ID NO: 233
hypothetical protein ABB45_04605 [Lactobacillus farciminis]
WP_010991369.1
SEQ ID NO: 234
type II CRISPR RNA-guided endonuclease Cas9 [Listeria innocua]
WP_033838504.1
SEQ ID NO: 235
type II CRISPR RNA-guided endonuclease Cas9 [Listeria innocua]
EHN60060.1
SEQ ID NO: 236
CRISPR-associated protein, Csn1 family [Listeria innocua 0ATCC 33091]
EFR89594.1
SEQ ID NO: 237
crispr-associated protein, Csn1 family [Listeria innocua FSL S4-378]
WP_038409211.1
SEQ ID NO: 238
type II CRISPR RNA-guided endonuclease Cas9 [Listeria ivanovii]
EFR95520.1
SEQ ID NO: 239
crispr-associated protein Csn1 [Listeria ivanovii FSL F6-596]
WP_003723650.1
SEQ ID NO: 240
type II CRISPR RNA-guided endonuclease Cas9 [Listeria monocytogenes]
WP_003727705.1
SEQ ID NO: 241
type II CRISPR RNA-guided endonuclease Cas9 [Listeria monocytogenes]
WP_003730785.1
SEQ ID NO: 242
type II CRISPR RNA-guided endonuclease Cas9 [Listeria monocytogenes]
WP_003733029.1
SEQ ID NO: 243
type II CRISPR RNA-guided endonuclease Cas9 [Listeria monocytogenes]
WP_003739838.1
SEQ ID NO: 244
type II CRISPR RNA-guided endonuclease Cas9 [Listeria monocytogenes]
WP_014601172.1
SEQ ID NO: 245
type II CRISPR RNA-guided endonuclease Cas9 [Listeria monocytogenes]
WP_023548323.1
SEQ ID NO: 246
type II CRISPR RNA-guided endonuclease Cas9 [Listeria monocytogenes]
WP_031665337.1
SEQ ID NO: 247
type II CRISPR RNA-guided endonuclease Cas9 [Listeria monocytogenes]
WP_031669209.1
SEQ ID NO: 248
type II CRISPR RNA-guided endonuclease Cas9 [Listeria monocytogenes]
WP_033920898.1
SEQ ID NO: 249
type II CRISPR RNA-guided endonuclease Cas9 [Listeria monocytogenes]
AKI42028.1
SEQ ID NO: 250
CRISPR-associated protein [Listeria monocytogenes]
AKI50529.1
SEQ ID NO: 251
CRISPR-associated protein [Listeria monocytogenes]
EFR83390.1
SEQ ID NO: 252
crispr-associated protein Csn1 [Listeria monocytogenes FSL F2-208]
WP_046323366.1
SEQ ID NO: 253
type II CRISPR RNA-guided endonuclease Cas9 [Listeria seeligeri]
AKE81011.1
SEQ ID NO: 254
Cas9 [Plant multiplex genome editing vector PYLCRISPR/Cas9Pubi-H]
CUO82355.1
SEQ ID NO: 255
Uncharacterized protein conserved in bacteria [Roseburia hominis]
WP_033162887.1
SEQ ID NO: 256
type II CRISPR RNA-guided endonuclease Cas9 [Sharpea azabuensis]
AGZ01981.1
SEQ ID NO: 257
Cas9 endonuclease [synthetic construct]
AKA60242.1
SEQ ID NO: 258
nuclease deficient Cas9 [synthetic construct]
AKS40380.1
SEQ ID NO: 259
Cas9 [Synthetic plasmid pFC330]
4UN5_B
SEQ ID NO: 260
Cas9, Chain B, Crystal Structure

### Example 2: Exemplary Adenosine Deaminases and Recombinant ecTadA Domains

[0455] Some aspects of this disclosure relate to the use of adenosine deaminase domains, such as, for example, in a fusion protein comprising a napDNAbp and a nucleic acid editing domain, wherein the nucleic acid editing domain is an adenosine deaminase. In some embodiments, the adenosine deaminase comprises an amino acid sequence that is at least 60%, 65%, 70%, 75%, 80%, 85%, 90%, 95, 98%, 99%, or 99.5% identical to any one of SEQ ID NOs: 400-458, or any of the adenosine deaminases provided herein. In some embodiments, the adenosine deaminase comprises an amino acid sequence that has 1, 2, 3, 4, 5, 6, 7, 8, 9, 10, 11, 12, 13, 14, 15, 16, 17, 18, 19, 20, 21, 22, 21, 24, 25, 26, 27, 28, 29, 30, 31, 32, 33, 34, 35, 36, 37, 38, 39, 40, 41, 42, 43, 44, 45, 46, 47, 48, 49, 50 or more mutations compared to any one of the amino acid sequences set forth in SEQ ID NOs: 400-458, or any of the adenosine deaminases provided herein. In some embodiments, the adenosine deaminase comprises an amino acid sequence that has at least 5, at least 10, at least 15, at least 20, at least 25, at least 30, at least 35, at least 40, at least 45, at least 50, at least 60, at least 70, at least 80, at least 90, at least 100, at least 110, at least 120, at least 130, at least 140, at least 150, at least 160, or at least 166, identical contiguous amino acid residues as compared to any one of the amino acid sequences set forth in SEQ ID NOs: 400-458, or any of the adenosine deaminases provided herein. In some embodiments, the adenosine deaminase comprises the amino acid sequence of any one of SEQ ID NOs: 400-458, or any of the adenosine deaminases provided herein. In some embodiments, the adenosine deaminase consists of the amino acid sequence of any one of SEQ ID NOs: 400-458, or any of the adenosine deaminases provided herein. The ecTadA sequences provided below are from ecTadA (SEQ ID NO: 400), absent the N-terminal methionine (M). The saTadA sequences provided below are from saTadA (SEQ ID NO: 402), absent the N-terminal methionine (M). For clarity, the amino acid numbering scheme used to identify the various amino acid mutations is derived from ecTadA (SEQ ID NO: 400) for E. coli TadA and saTadA (SEQ ID NO: 402) for S. aureus TadA. Amino acid mutations, relative to SEQ ID NO: 400 (ecTadA) or SEQ DI NO: 402 (saTadA), are indicated by underlining.

ecTadA
(SEQ ID NO: 409)
SEVEFSHEYWMRHALTLAKRAWDEREVPVGAVLVHNNRVIGEGWNRPIGRHDPTAHAEIMALRQGGLVM
QNYRLIDATLYVTLEPCVMCAGAMIHSRIGRVVFGARDAKTGAAGSLMDVLHHPGMNHRVEITEGILAD
ECAALLSDFFRMRRQEIKAQKKAQSSTD
ecTadA (D108N)
(SEQ ID NO: 410)
SEVEFSHEYWMRHALTLAKRAWDEREVPVGAVLVHNNRVIGEGWNRPIGRHDPTAHAEIMALRQGGLVM
QNYRLIDATLYVTLEPCVMCAGAMIHSRIGRVVFGARNAKTGAAGSLMDVLHHPGMNHRVEITEGILAD
ECAALLSDFFRMRRQEIKAQKKAQSSTD
ecTadA (D108G)
(SEQ ID NO: 411)
SEVEFSHEYWMRHALTLAKRAWDEREVPVGAVLVHNNRVIGEGWNRPIGRHDPTAHAEIMALRQGGLVM
QNYRLIDATLYVTLEPCVMCAGAMIHSRIGRVVFGARGAKTGAAGSLMDVLHHPGMNHRVEITEGILAD
ECAALLSDFFRMRRQEIKAQKKAQSSTD
ecTadA (D108V)
(SEQ ID NO: 412)
SEVEFSHEYWMRHALTLAKRAWDEREVPVGAVLVHNNRVIGEGWNRPIGRHDPTAHAEIMALRQGGLVM
QNYRLIDATLYVTLEPCVMCAGAMIHSRIGRVVFGARVAKTGAAGSLMDVLHHPGMNHRVEITEGILAD
ECAALLSDFFRMRRQEIKAQKKAQSSTD
ecTadA (H8Y, D108N, and N127S)
(SEQ ID NO: 413)
SEVEFSYEYWMRHALTLAKRAWDEREVPVGAVLVHNNRVIGEGWNRPIGRHDPTAHAEIMALRQGGLVM
QNYRLIDATLYVTLEPCVMCAGAMIHSRIGRVVFGARNAKTGAAGSLMDVLHHPGMSHRVEITEGILAD
ECAALLSDFFRMRRQEIKAQKKAQSSTD
ecTadA (H8Y, D108N, N127S, and E155D)
(SEQ ID NO: 414)
SEVEFSYEYWMRHALTLAKRAWDEREVPVGAVLVHNNRVIGEGWNRPIGRHDPTAHAEIMALRQGGLVM
QNYRLIDATLYVTLEPCVMCAGAMIHSRIGRVVFGARNAKTGAAGSLMDVLHHPGMSHRVEITEGILAD
ECAALLSDFFRMRRQDIKAQKKAQSSTD
ecTadA (H8Y, D108N, N127S, and E155G)
(SEQ ID NO: 415)
SEVEFSYEYWMRHALTLAKRAWDEREVPVGAVLVHNNRVIGEGWNRPIGRHDPTAHAEIMALRQGGLVM
QNYRLIDATLYVTLEPCVMCAGAMIHSRIGRVVFGARNAKTGAAGSLMDVLHHPGMSHRVEITEGILAD
ECAALLSDFFRMRRQGIKAQKKAQSSTD
ecTadA (H8Y, D108N, N127S, and E155V)
(SEQ ID NO: 416)
SEVEFSYEYWMRHALTLAKRAWDEREVPVGAVLVHNNRVIGEGWNRPIGRHDPTAHAEIMALRQGGLVM
QNYRLIDATLYVTLEPCVMCAGAMIHSRIGRVVFGARNAKTGAAGSLMDVLHHPGMSHRVEITEGILAD
ECAALLSDFFRMRRQVIKAQKKAQSSTD
ecTadA (A106V, D108N, D147Y, and E155V)
(SEQ ID NO: 417)
SEVEFSHEYWMRHALTLAKRAWDEREVPVGAVLVHNNRVIGEGWNRPIGRHDPTAHAEIMALRQGGLVM
QNYRLIDATLYVTLEPCVMCAGAMIHSRIGRVVFGVRNAKTGAAGSLMDVLHHPGMNHRVEITEGILAD
ECAALLSYFFRMRRQVIKAQKKAQSSTD
ecTadA (L84F, A106V, D108N, H123Y, D147Y, E155V, I156F)
(SEQ ID NO: 418)
SEVEFSHEYWMRHALTLAKRAWDEREVPVGAVLVHNNRVIGEGWNRPIGRHDPTAHAEIMALRQGGLVM
QNYRLIDATLYVTFEPCVMCAGAMIHSRIGRVVFGVRNAKTGAAGSLMDVLHYPGMNHRVEITEGILAD
ECAALLSYFFRMRRQVFKAQKKAQSSTD
ecTadA (S2A, I49F, A106V, D108N, D147Y, E155V)
(SEQ ID NO: 419)
AEVEFSHEYWMRHALTLAKRAWDEREVPVGAVLVHNNRVIGEGWNRPFGRHDPTAHAEIMALRQGGLVM
QNYRLIDATLYVTLEPCVMCAGAMIHSRIGRVVFGVRNAKTGAAGSLMDVLHHPGMNHRVEITEGILAD
ECAALLSYFFRMRRQVIKAQKKAQSSTD
ecTadA (H8Y, A106T, D108N, N127S, K160S)
(SEQ ID NO: 420)
SEVEFSYEYWMRHALTLAKRAWDEREVPVGAVLVHNNRVIGEGWNRPIGRHDPTAHAEIMALRQGGLVM
QNYRLIDATLYVTLEPCVMCAGAMIHSRIGRVVFGTRNAKTGAAGSLMDVLHHPGMSHRVEITEGILAD
ECAALLSDFFRMRRQEIKAQSKAQSSTD
ecTadA (R26G, L84F, A106V, R107H, D108N, H123Y, A142N, A143D, D147Y,
E155V, I156F)
(SEQ ID NO: 421)
SEVEFSHEYWMRHALTLAKRAWDEGEVPVGAVLVHNNRVIGEGWNRPIGRHDPTAHAEIMALRQGGLVM
QNYRLIDATLYVTFEPCVMCAGAMIHSRIGRVVFGVHNAKTGAAGSLMDVLHYPGMNHRVEITEGILAD
ECNDLLSYFFRMRRQVFKAQKKAQSSTD
ecTadA (E25G, R26G, L84F, A106V, R107H, D108N, H123Y, A142N, A143D,
D147Y, E155V, I156F)
(SEQ ID NO: 422)
SEVEFSHEYWMRHALTLAKRAWDGGEVPVGAVLVHNNRVIGEGWNRPIGRHDPTAHAEIMALRQGGLVM
QNYRLIDATLYVTFEPCVMCAGAMIHSRIGRVVFGVHNAKTGAAGSLMDVLHYPGMNHRVEITEGILAD
ECNDLLSYFFRMRRQVFKAQKKAQSSTD
ecTadA (E25D, R26G, L84F, A106V, R107K, D108N, H123Y, A142N, A143G,
D147Y, E155V, I156F)
(SEQ ID NO: 423)
SEVEFSHEYWMRHALTLAKRAWDDGEVPVGAVLVHNNRVIGEGWNRPIGRHDPTAHAEIMALRQGGLVM
QNYRLIDATLYVTFEPCVMCAGAMIHSRIGRVVFGVKNAKTGAAGSLMDVLHYPGMNHRVEITEGILAD
ECNGLLSYFFRMRRQVFKAQKKAQSSTD
ecTadA (R26Q, L84F, A106V, D108N, H123Y, A142N, D147Y, E155V, I156F)
(SEQ ID NO: 424)
SEVEFSHEYWMRHALTLAKRAWDEQEVPVGAVLVHNNRVIGEGWNRPIGRHDPTAHAEIMALRQGGLVM
QNYRLIDATLYVTFEPCVMCAGAMIHSRIGRVVFGVRNAKTGAAGSLMDVLHYPGMNHRVEITEGILAD
ECNALLSYFFRMRRQVFKAQKKAQSSTD
ecTadA (E25M, R26G, L84F, A106V, R107P, D108N, H123Y, A142N, A143D,
D147Y, E155V, I156F)
(SEQ ID NO: 425)
SEVEFSHEYWMRHALTLAKRAWDMGEVPVGAVLVHNNRVIGEGWNRPIGRHDPTAHAEIMALRQGGLVM
QNYRLIDATLYVTFEPCVMCAGAMIHSRIGRVVFGVPNAKTGAAGSLMDVLHYPGMNHRVEITEGILAD
ECNDLLSYFFRMRRQVFKAQKKAQSSTD
ecTadA (R26C, L84F, A106V, R107H, D108N, H123Y, A142N, D147Y, E155V,
I156F)
(SEQ ID NO: 426)
SEVEFSHEYWMRHALTLAKRAWDECEVPVGAVLVHNNRVIGEGWNRPIGRHDPTAHAEIMALRQGGLVM
QNYRLIDATLYVTFEPCVMCAGAMIHSRIGRVVFGVHNAKTGAAGSLMDVLHYPGMNHRVEITEGILAD
ECNALLSYFFRMRRQVFKAQKKAQSSTD
ecTadA (L84F, A106V , D108N, H123Y, A142N, A143L, D147Y, E155V, I156F)
(SEQ ID NO: 427)
SEVEFSHEYWMRHALTLAKRAWDEREVPVGAVLVHNNRVIGEGWNRPIGRHDPTAHAEIMALRQGGLVM
QNYRLIDATLYVTFEPCVMCAGAMIHSRIGRVVFGVRNAKTGAAGSLMDVLHYPGMNHRVEITEGILAD
ECNLLLSYFFRMRRQVFKAQKKAQSSTD
ecTadA (R26G, L84F, A106V, D108N, H123Y, A142N, D147Y, E155V, I156F)
(SEQ ID NO: 428)
SEVEFSHEYWMRHALTLAKRAWDEGEVPVGAVLVHNNRVIGEGWNRPIGRHDPTAHAEIMALRQGGLVM
QNYRLIDATLYVTFEPCVMCAGAMIHSRIGRVVFGVRNAKTGAAGSLMDVLHYPGMNHRVEITEGILAD
ECNALLSYFFRMRRQVFKAQKKAQSSTD
ecTadA (E25A, R26G, L84F, A106V, R107N, D108N, H123Y, A142N, A143E,
D147Y, E155V, I156F)
(SEQ ID NO: 429)
SEVEFSHEYWMRHALTLAKRAWDAGEVPVGAVLVHNNRVIGEGWNRPIGRHDPTAHAEIMALRQGGLVM
QNYRLIDATLYVTFEPCVMCAGAMIHSRIGRVVEGVNNAKTGAAGSLMDVLHYPGMNHRVEITEGILAD
ECNELLSYFFRMRRQVFKAQKKAQSSTD
ecTadA (L84F, A106V, D108N, H123Y, D147Y, E155V, I156F)
(SEQ ID NO: 430)
SEVEFSHEYWMRHALTLAKRAWDEREVPVGAVLVHNNRVIGEGWNRPIGRHDPTAHAEIMALRQGGLVM
QNYRLIDATLYVTFEPCVMCAGAMIHSRIGRVVFGVRNAKTGAAGSLMDVLHYPGMNHRVEITEGILAD
ECAALLSYFFRMRRQVFKAQKKAQSSTD
ecTadA (N37T, P48T, L84F, A106V, D108N, H123Y, D147Y, E155V, I156F)
(SEQ ID NO: 431)
SEVEFSHEYWMRHALTLAKRAWDEREVPVGAVLVHTNRVIGEGWNRTIGRHDPTAHAEIMALRQGGLVM
QNYRLIDATLYVTFEPCVMCAGAMIHSRIGRVVFGVRNAKTGAAGSLMDVLHYPGMNHRVEITEGILAD
ECAALLSYFFRMRRQVFKAQKKAQSSTD
ecTadA (N37S, L84F, A106V, D108N, H123Y, D147Y, E155V, I156F)
(SEQ ID NO: 432)
SEVEFSHEYWMRHALTLAKRAWDEREVPVGAVLVHSNRVIGEGWNRPIGRHDPTAHAEIMALRQGGLVM
QNYRLIDATLYVTFEPCVMCAGAMIHSRIGRVVFGVRNAKTGAAGSLMDVLHYPGMNHRVEITEGILAD
ECAALLSYFFRMRRQVFKAQKKAQSSTD
ecTadA (H36L, L84F, A106V, D108N, H123Y, D147Y, E155V, I156F)
(SEQ ID NO: 433)
SEVEFSHEYWMRHALTLAKRAWDEREVPVGAVLVLNNRVIGEGWNRPIGRHDPTAHAEIMALRQGGLVM
QNYRLIDATLYVTFEPCVMCAGAMIHSRIGRVVFGVRNAKTGAAGSLMDVLHYPGMNHRVEITEGILAD
ECAALLSYFFRMRRQVFKAQKKAQSSTD
ecTadA (L84F, A106V, D108N, H123Y, S146R, D147Y, E155V, I156F)
(SEQ ID NO: 434)
SEVEFSHEYWMRHALTLAKRAWDEREVPVGAVLVHNNRVIGEGWNRPIGRHDPTAHAEIMALRQGGLVM
QNYRLIDATLYVTFEPCVMCAGAMIHSRIGRVVFGVRNAKTGAAGSLMDVLHYPGMNHRVEITEGILAD
ECAALLRYFFRMRRQVFKAQKKAQSSTD
ecTadA (H36L, P48L, L84F, A106V, D108N, H123Y, D147Y, E155V, I156F)
(SEQ ID NO: 435)
SEVEFSHEYWMRHALTLAKRAWDEREVPVGAVLVLNNRVIGEGWNRLIGRHDPTAHAEIMALRQGGLVM
QNYRLIDATLYVTFEPCVMCAGAMIHSRIGRVVFGVRNAKTGAAGSLMDVLHYPGMNHRVEITEGILAD
ECAALLSYFFRMRRQVFKAQKKAQSSTD
ecTadA (H36L, L84F, A106V, D108N, H123Y, D147Y, E155V, K57N, I156F)
(SEQ ID NO: 436)
SEVEFSHEYWMRHALTLAKRAWDEREVPVGAVLVLNNRVIGEGWNRPIGRHDPTAHAEIMALRQGGLVM
QNYRLIDATLYVTFEPCVMCAGAMIHSRIGRVVFGVRNAKTGAAGSLMDVLHYPGMNHRVEITEGILAD
ECAALLSYFFRMRRQVFNAQKKAQSSTD
ecTadA (H36L, L84F, A106V, D108N, H123Y, S146C, D147Y, E155V, I156F)
(SEQ ID NO: 437)
SEVEFSHEYWMRHALTLAKRAWDEREVPVGAVLVLNNRVIGEGWNRPIGRHDPTAHAEIMALRQGGLVM
QNYRLIDATLYVTFEPCVMCAGAMIHSRIGRVVFGVRNAKTGAAGSLMDVLHYPGMNHRVEITEGILAD
ECAALLCYFFRMRRQVFKAQKKAQSSTD
ecTadA (L84F, A106V, D108N, H123Y, S146R, D147Y, E155V, I156F)
(SEQ ID NO: 438)
SEVEFSHEYWMRHALTLAKRAWDEREVPVGAVLVHNNRVIGEGWNRPIGRHDPTAHAEIMALRQGGLVM
QNYRLIDATLYVTFEPCVMCAGAMIHSRIGRVVFGVRNAKTGAAGSLMDVLHYPGMNHRVEITEGILAD
ECAALLRYFFRMRRQVFKAQKKAQSSTD
ecTadA (N37S, R51H, L84F, A106V, D108N, H123Y, D147Y, E155V, I156F)
(SEQ ID NO: 439)
SEVEFSHEYWMRHALTLAKRAWDEREVPVGAVLVHSNRVIGEGWNRPIGHHDPTAHAEIMALRQGGLVM
QNYRLIDATLYVTFEPCVMCAGAMIHSRIGRVVFGVRNAKTGAAGSLMDVLHYPGMNHRVEITEGILAD
ECAALLSYFFRMRRQVFKAQKKAQSSTD
ecTadA (R51L, L84F, A106V, D108N, H123Y, D147Y, E155V, I156F, K157N)
(SEQ ID NO: 440)
SEVEFSHEYWMRHALTLAKRAWDEREVPVGAVLVHNNRVIGEGWNRPIGLHDPTAHAEIMALRQGGLVM
QNYRLIDATLYVTFEPCVMCAGAMIHSRIGRVVFGVRNAKTGAAGSLMDVLHYPGMNHRVEITEGILAD
ECAALLSYFFRMRRQVFNAQKKAQSSTD
ecTadA (R51H, L84F, A106V, D108N, H123Y, D147Y, E155V, I156F, K157N)
(SEQ ID NO: 441)
SEVEFSHEYWMRHALTLAKRAWDEREVPVGAVLVHNNRVIGEGWNRPIGHHDPTAHAEIMALRQGGLVM
QNYRLIDATLYVTFEPCVMCAGAMIHSRIGRVVFGVRNAKTGAAGSLMDVLHYPGMNHRVEITEGILAD
ECAALLSYFFRMRRQVFNAQKKAQSSTD
ecTadA (P48S)
(SEQ ID NO: 442)
SEVEFSHEYWMRHALTLAKRAWDEREVPVGAVLVHNNRVIGEGWNRSIGRHDPTAHAEIMALRQGGLVM
QNYRLIDATLYVTLEPCVMCAGAMIHSRIGRVVFGARDAKTGAAGSLMDVLHHPGMNHRVEITEGILAD
ECAALLSDFFRMRRQEIKAQKKAQSSTD
ecTadA (P48T)
(SEQ ID NO: 443)
SEVEFSHEYWMRHALTLAKRAWDEREVPVGAVLVHNNRVIGEGWNRTIGRHDPTAHAEIMALRQGGLVM
QNYRLIDATLYVTLEPCVMCAGAMIHSRIGRVVFGARDAKTGAAGSLMDVLHHPGMNHRVEITEGILAD
ECAALLSDFFRMRRQEIKAQKKAQSSTD
ecTadA (P48A)
(SEQ ID NO: 444)
SEVEFSHEYWMRHALTLAKRAWDEREVPVGAVLVHNNRVIGEGWNRAIGRHDPTAHAEIMALRQGGLVM
QNYRLIDATLYVTLEPCVMCAGAMIHSRIGRVVFGARDAKTGAAGSLMDVLHHPGMNHRVEITEGILAD
ECAALLSDFFRMRRQEIKAQKKAQSSTD
ecTadA (A142N)
(SEQ ID NO: 445)
SEVEFSHEYWMRHALTLAKRAWDEREVPVGAVLVHNNRVIGEGWNRPIGRHDPTAHAEIMALRQGGLVM
QNYRLIDATLYVTLEPCVMCAGAMIHSRIGRVVFGARDAKTGAAGSLMDVLHHPGMNHRVEITEGILAD
ECNALLSDFFRMRRQEIKAQKKAQSSTD
ecTadA (W23R)
(SEQ ID NO: 446)
SEVEFSHEYWMRHALTLAKRARDEREVPVGAVLVHNNRVIGEGWNRPIGRHDPTAHAEIMALRQGGLVM
QNYRLIDATLYVTLEPCVMCAGAMIHSRIGRVVFGARDAKTGAAGSLMDVLHHPGMNHRVEITEGILAD
ECAALLSDFFRMRRQEIKAQKKAQSSTD
ecTadA (W23L)
(SEQ ID NO: 447)
SEVEFSHEYWMRHALTLAKRALDEREVPVGAVLVHNNRVIGEGWNRPIGRHDPTAHAEIMALRQGGLVM
QNYRLIDATLYVTLEPCVMCAGAMIHSRIGRVVFGARDAKTGAAGSLMDVLHHPGMNHRVEITEGILAD
ECAALLSDFFRMRRQEIKAQKKAQSSTD
ecTadA (R152P)
(SEQ ID NO: 448)
SEVEFSHEYWMRHALTLAKRAWDEREVPVGAVLVHNNRVIGEGWNRPIGRHDPTAHAEIMALRQGGLVM
QNYRLIDATLYVTLEPCVMCAGAMIHSRIGRVVFGARDAKTGAAGSLMDVLHHPGMNHRVEITEGILAD
ECAALLSDFFRMPRQEIKAQKKAQSSTD
ecTadA (R152H)
(SEQ ID NO: 449)
SEVEFSHEYWMRHALTLAKRAWDEREVPVGAVLVHNNRVIGEGWNRPIGRHDPTAHAEIMALRQGGLVM
QNYRLIDATLYVTLEPCVMCAGAMIHSRIGRVVFGARDAKTGAAGSLMDVLHHPGMNHRVEITEGILAD
ECAALLSDFFRMHRQEIKAQKKAQSSTD
ecTadA (L84F, A106V, D108N, H123Y, D147Y, E155V, I156F)
(SEQ ID NO: 450)
SEVEFSHEYWMRHALTLAKRAWDEREVPVGAVLVHNNRVIGEGWNRPIGRHDPTAHAEIMALRQGGLVM
QNYRLIDATLYVTFEPCVMCAGAMIHSRIGRVVFGVRNAKTGAAGSLMDVLHYPGMNHRVEITEGILAD
ECAALLSYFFRMRRQVFKAQKKAQSSTD
ecTadA (H36L, R51L, L84F, A106V, D108N, H123Y, S146C, D147Y, E155V,
I156F, K157N)
(SEQ ID NO: 451)
SEVEFSHEYWMRHALTLAKRAWDEREVPVGAVLVLNNRVIGEGWNRPIGLHDPTAHAEIMALRQGGLVM
QNYRLIDATLYVTFEPCVMCAGAMIHSRIGRVVFGVRNAKTGAAGSLMDVLHYPGMNHRVEITEGILAD
ECAALLCYFFRMRRQVFNAQKKAQSSTD
ecTadA (H36L, P48S, R51L, L84F, A106V, D108N, H123Y, S146C, D147Y,
E155V, I156F, K157N)
(SEQ ID NO: 452)
SEVEFSHEYWMRHALTLAKRAWDEREVPVGAVLVLNNRVIGEGWNRSIGLHDPTAHAEIMALRQGGLVM
QNYRLIDATLYVTFEPCVMCAGAMIHSRIGRVVFGVRNAKTGAAGSLMDVLHYPGMNHRVEITEGILAD
ECAALLCYFFRMRRQVFNAQKKAQSSTD
ecTadA (H36L, P48A, R51L, L84F, A106V, D108N, H123Y, S146C, D147Y,
E155V, I156F, K157N)
(SEQ ID NO: 453)
SEVEFSHEYWMRHALTLAKRAWDEREVPVGAVLVLNNRVIGEGWNRAIGLHDPTAHAEIMALRQGGLVM
QNYRLIDATLYVTFEPCVMCAGAMIHSRIGRVVFGVRNAKTGAAGSLMDVLHYPGMNHRVEITEGILAD
ECAALLCYFFRMRRQVFNAQKKAQSSTD
ecTadA (W23L, H36L, P48A, R51L, L84F, A106V, D108N, H123Y, S146C, D147Y,
R152P, E155V, I156F, K157N)
(SEQ ID NO: 454)
SEVEFSHEYWMRHALTLAKRALDEREVPVGAVLVLNNRVIGEGWNRAIGLHDPTAHAEIMALRQGGLVM
QNYRLIDATLYVTFEPCVMCAGAMIHSRIGRVVFGVRNAKTGAAGSLMDVLHYPGMNHRVEITEGILAD
ECAALLCYFFRMPRQVFNAQKKAQSSTD
ecTadA (H36L, P48S, R51L, L84F, A106V, D108N, H123Y, A142N, S146C,
D147Y, E155V, I156F, K157N)
(SEQ ID NO: 455)
SEVEFSHEYWMRHALTLAKRAWDEREVPVGAVLVLNNRVIGEGWNRSIGLHDPTAHAEIMALRQGGLVM
QNYRLIDATLYVTFEPCVMCAGAMIHSRIGRVVFGVRNAKTGAAGSLMDVLHYPGMNHRVEITEGILAD
ECNALLCYFFRMRRQVFNAQKKAQSSTD
ecTadA (W23L, H36L, P48A, R51L, L84F, A106V, D108N, H123Y, A142N, S146C,
D147Y, E155V, I156F, K157N)
(SEQ ID NO: 456)
SEVEFSHEYWMRHALTLAKRALDEREVPVGAVLVLNNRVIGEGWNRAIGLHDPTAHAEIMALRQGGLVM
QNYRLIDATLYVTFEPCVMCAGAMIHSRIGRVVFGVRNAKTGAAGSLMDVLHYPGMNHRVEITEGILAD
ECNALLCYFFRMRRQVFNAQKKAQSSTD
ecTadA (W23L, H36L, P48A, R51L, L84F, A106V, D108N, H123Y, A142N, S146C,
D147Y, R152P, E155V, I156F, K157N)
(SEQ ID NO: 457)
SEVEFSHEYWMRHALTLAKRALDEREVPVGAVLVLNNRVIGEGWNRAIGLHDPTAHAEIMALRQGGLVM
QNYRLIDATLYVTFEPCVMCAGAMIHSRIGRVVFGVRNAKTGAAGSLMDVLHYPGMNHRVEITEGILAD
ECNALLCYFFRMPRQVFNAQKKAQSSTD
ecTadA (W23R, H36L, P48A, R51L, L84F, A106V, D108N, H123Y, S146C,
D147Y, R152P, E155V, I156F, K157N)
(SEQ ID NO: 458)
SEVEFSHEYWMRHALTLAKRALDEREVPVGAVLVLNNRVIGEGWNRAIGLHDPTAHAEIMALRQGGLVM
QNYRLIDATLYVTFEPCVMCAGAMIHSRIGRVVFGVRNAKTGAAGSLMDVLHYPGMNHRVEITEGILAD
ECAALLCYFFRMPRQVFNAQKKAQSSTD

### Example 4: Rewritable Multi-Event Analog Recording in Bacterial and Mammalian Cells Mediated by Base Editors and CRISPR Nucleases

[0456] The stable recording of cellular events has the potential to advance the understanding of a cell's history and its responses to stimuli. The construction of intracellular memory devices that record a history of cellular events, however, has proven very challenging. Two CRISPR-mediated analog multi-event recording apparatus (CAMERA) systems are presented herein that use base editors and Cas9 nucleases to stably record molecular events of interest in the DNA content of living cells. The devices record the amplitude and duration of exogenous signals in an analog mode as changes in the ratio of mutually exclusive genomic or extrachromosomal DNA sequences and offer a large storage capacity while consuming limited cellular resources. Simultaneous recording of multiple stimuli including exposure to antibiotics, nutrients, viruses, light, and a kinase inhibitor was achieved by integrating diverse synthetic circuits into CAMERA 1 and CAMERA 2. The order of stimuli can be recorded through an overlapping guide RNA design. When recording to multi-copy plasmids, the device functions at the single-cell level and a reliable readout can be obtained by sequencing as few as 10-100 cells. Recorded memories can be erased and re-recorded over multiple cycles. The CAMERA 2 system was used in human cells to record the presence of exogenous small molecules as well as changes in Wnt signaling as single-base changes at a safe-harbor locus in the human genome. CAMERA systems can serve as “cell data recorders” that write a history of endogenous or exogenous signals into permanent DNA sequence modifications in living cells.

[0457] Recent technologies have enabled the study of the internal state of cells in exquisite detail, including the sequence of the genome, the status of epigenetic modifications, and the identity and abundance of cellular RNAs, proteins, metabolites that collectively determine cell state (1, 2). Far less developed are tools to reveal a cell's history and how that history determines present and future cell states, despite the potential impact of such capabilities. Detailed information on cell states during division and differentiation, for example, could illuminate the process of aging, and recording the presence and duration of exposure to external or internal stresses could inform the emergence of cancer and other diseases. Recording a cell's history in a highly multiplexable, durable, and minimally perturbative form has been a long-standing challenge of the life sciences (3, 4).

[0458] Transient recording of environmental signals has been achieved by manipulating transcription and translation in bacteria (5). Information recorded in this manner, however, cannot be passed on to future generations of cells and the recording process itself is delicate since many factors contribute to transcription and translation efficiencies. In contrast, recombinases can activate bi-stable toggle switches embedded in the genome and the resulting information stored in DNA can be read even after cell death (6, 7). Although individual signals of interest can be stably recorded using recombinase-based memory devices, orthogonal recombinases are required to record more than one bit of information. Moreover, bi-stable toggle switches operated by recombinases can record the presence or suggest the absence of the stimuli of interest, but their use to record signal strength, duration, or order is challenging (3).

[0459] In contrast to digital memory devices that store information in one of two distinct states (on or off), synthetic analog memory devices that leave permanent marks in DNA in a manner that reflects the strength or duration of endogenous or exogenous stimuli in theory could illuminate cellular history, reveal how a stimulus dictates downstream responses, and improve our ability to predict cell behavior (3). Recently Lu and coworkers reported synthetic cellular recorders integrating biological events (SCRIBE), an elegant memory device that translates exogenous signals into point mutations in a bacterial genome through Beta protein-assisted single-stranded DNA incorporation (8). Because the production of single-stranded DNA by the adapted retrovirus cassette is not efficient, SCRIBE requires the sampling of large populations of bacteria for both recording and readout (8).

[0460] To develop a memory device that is less dependent on a large cell population, we chose the clustered regularly interspaced short palindromic repeats (CRISPR)-Cas9 nuclease (9-11) and CRISPR-derived base editors (12, 13) to serve as DNA writing modules. Both Cas9 nuclease and base editors make changes in cellular DNA in an efficient and programmable manner when complexed with guide RNAs (9, 12). If linked to stimuli or cell state changes, these DNA modifications in principle could serve as durable messages that reflect a cell's history and could be read out using modern sequencing technologies, even after cell death. In this work, we present two CRISPR-mediated analog multi-event recording apparatus (CAMERA) systems and demonstrate their ability to record simultaneously multiple cell states, including exposure to antibiotics, nutrients, viruses, light, and a kinase inhibitor that alters endogenous Wnt signaling. CAMERA systems record both the strength of signals and the duration of exposure as durable and predictable changes in the DNA of bacteria or mammalian cells.

### A Plasmid Compensation System as an Information Carrier in Bacteria

[0461] The S. pyogenes Cas9 (SpCas9) nuclease was chosen as an initial DNA writing module because it functions robustly across many different cell types in vitro and in vivo (11, 14). SpCas9 makes double-stranded DNA breaks at loci that match the 20-base “spacer region” of a single guide RNA (sgRNA) and that are near an NGG protospacer-adjacent motif (PAM). In mammalian cells, the resulting double-stranded breaks can be repaired by nonhomologous end joining (NHEJ) and similar processes to introduce insertions and deletions (indels), or through homology-directed repair (HDR) by supplying a template strand. In bacteria, however, double-stranded DNA breaks frequently cause cell death or a loss of extrachromosomal DNA (15, 16). To translate DNA loss following double-stranded breaks into durable information, a high-copy number plasmid compensation system to store DNA modification states was designed. This strategy enables analog recording within each cell and thereby avoids dependence on large cell populations.

[0462] The plasmid compensation system includes a pair of nearly identical recording plasmids, R1 and R2, that differ only at a 3-nucleotide coding mutation in an EGFP gene (FIG. 1A). The EGFP gene encoded by R1 expresses full length-fluorescent protein, whereas the EGFP gene in R2 contains a premature stop codon and cannot produce fluorescent protein (FIG. 1A). Because the two plasmids are virtually identical, it was hypothesized that their fitness cost to host cells is very similar and they should coexist in a stable ratio for long periods of time.

[0463] The R1:R2 ratio serves as the information carrier that reflects the signal of interest in an analog mode. To convert the signal of interest into an R1:R2 ratio change, a Cas9:sgRNA pair induced by the stimulus cleaves plasmid R1 but not R2 (FIG. 1A). The resulting double-stranded break causes the loss of R1. Because the two recording plasmids share the same origin of replication that controls the total copy number of the plasmids in bacteria, the loss of R1 initiates the replication of the remaining plasmids and the gradual accumulation of R2. A high copy number plasmid (pUC) was chosen to maximize the analog recording range of the system (FIG. 1A).

[0464] To test the stability of the plasmid compensation recording system, E. coli strain S1030 (17) was co-transformed with R1 and R2 and two single colonies with different R1:R2 ratios were isolated. The colonies were separately grown in LB media at 37° C. and the culture was diluted 500- or 1,000-fold six times over 144 hours for a total dilution ratio of 107 (FIG. 1B). The two starting colonies contained 29% R1 and 60% R1, and their R1:R2 ratio was very stably maintained throughout the growth and dilution process (FIG. 1B), ending at 29% R1 and 59% R1, respectively. These results indicate that R1:R2 ratio can serve as a stable analog information carrier across a range of plasmid ratios.

[0465] To assess the potential growth burden that the recording plasmid pair might impose on bacteria, growth curves were measured for the parental E. coli strain S1030 and two S1030 colonies containing R1 and R2 in different ratios (29% R1 or 60% R1, FIG. 6). The colonies harboring R1 and R2 exhibited the same growth rate as the parental strain in the presence or absence of the selection antibiotic and all bacterial cultures reached the same final cell density, suggesting that the recording plasmids do not substantially impair bacterial fitness.

### A CRISPR Nuclease Writing Module Enables CAMERA 1

[0466] A writing module was designed that cleaves R1 but not R2 at the three-nucleotide region that differs between R1 and R2. This region was chosen to be proximal to the PAM to maximize the selectivity of the writing module (18) (FIG. 1A). The EGFP gene fragments from both plasmids were incubated in vitro with the Cas9:sgRNA complex. The functional EGFP gene amplified from plasmid R1, but not the mutated EGFP gene encoded by plasmid R2, was cleaved into two fragments (FIG. 1C). These results establish that the writing module can distinguish plasmids R1 and R2 and introduce double-stranded breaks selectively in R1.

[0467] Next the system was moved into live bacteria to test if it could translate an exogenous signal into a durable change in the DNA content of the cell. A TetO promoter that is inducible with anhydrotetracycline (aTc) was placed upstream of the Cas9 gene, and placed a constitutive Lac promoter upstream of the R1-targeting sgRNA in writing plasmids W1.0.1-W1.0.3 (FIG. 1D and FIG. 7), forming the CAMERA 1.0 system. Bacteria containing CAMERA 1.0 with a R1:R2 ratio of 58:42 were used to test aTc-stimulated recording. After being cultured in the presence or absence of aTc for 3 hours and 6 hours, the bacteria were harvested and analyzed for their R1 content by high-throughput sequencing (HTS). In the absence of aTc, R1 content remained steady (59%) after 3 hours and was only slightly lower (56%) after 6 hours (FIG. 1D). This basal level of R1 consumption can be attributed to low-level transcription of the uninduced TetO promoter. In contrast, R1 content responded strongly to the presence of aTc and decreased to 21% in 3 hours, and to 4% after 6 hours (FIG. 1D). Collectively, these results suggest that CAMERA 1.0 can sensitively detect and record the presence of an exogenous small molecule and the duration of exposure in an analog format.

### Recording of Multiple Stimuli Using CAMERA 1 Derivatives

[0468] To enable recording of more than one stimulus, the LacO promoter was installed, which was suppressed by LacI and activated by IPTG, upstream of the sgRNA to generate CAMERA 1.1 (FIG. 2A). Both aTc and IPTG are required to initiate recording in CAMERA 1.1. A bacterial colony carrying CAMERA 1.1 with a starting R1 content of 77% was chosen and applied different inducer combinations for 3 hours (FIG. 2A). As expected, R1:R2 ratio remained stable in the absence of stimuli or in the presence of 0.5 mM IPTG only. A slightly lower R1 content (to 70%) was observed when the bacteria were treated with 100 ng/mL aTc only (FIG. 2A), consistent with the known leakiness of the LacO promoter in the absence of IPTG (19). Importantly, R1 content decreased to 37% when bacteria were cultured in the presence of both aTc and IPTG (FIG. 2A), indicating that both stimuli are required to promote substantial R1:R2 ratio changes, recapitulating an “AND” Boolean logic gate.

[0469] One advantage of the CAMERA 1 design is that it records signals in an analog format that can capture more information than binary switches. To explore the analog recording capabilities of CAMERA 1.1, the bacterial culture was treated with different doses of IPTG ranging from 0 to 150 μM with a constant aTc input of 100 ng/mL for 3 hours (FIG. 2B). The R1 content was followed by monitoring EGFP fluorescence and by DNA sequencing. EGFP expression was initiated by diluting the bacterial culture with fresh media lacking aTc or IPTG after the recording process was finished. As anticipated, the EGFP signal decreased as the concentration of IPTG increased, reflecting an increased depletion rate of R1, saturating at 30 μM of IPTG (FIG. 2B). Importantly, the relationship between EGFP loss and IPTG concentration at low dosages (≤10 μM) was predictable and linear (FIG. 2B), suggesting that R1:R2 ratio can be used to infer signal amplitude in a reliable manner. HTS of the bacterial culture confirmed these dose-dependent changes in R1:R2 ratio (FIG. 8). Collectively, these findings establish that CAMERA 1.1 can record multiple stimuli of interest in an analog, dose-dependent, and durable manner.

### Erasing and Re-Recording of CAMERA 1 Systems

[0470] Memory devices are particularly versatile if they can be erased and rewritten as needed. Instead of using R1 and R2, the CAMERA 1.2 system contains two recording plasmids, R3 and R4, that each confer resistance to different antibiotics. Similar to R1, R3 can be targeted by a writing plasmid expressing Cas9 and an sgRNA to cause a shift in the R3:R4 ratio. To minimize the growth advantage between R3 and R4, genes encoding two antibiotic resistance proteins, chloramphenicol acetyltransferase (Cat, which inactivates chloramphenicol), and aminoglycoside-3′-phosphotransferase (Aph3′, which targets kanamycin), were fused and a single point mutation in either of the two domains was incorporated. R3 expressed inactive Cat H195A (20) fused to wild-type Aph3′, while R4 expressed inactive Aph3′ D208A (21) fused to wild-type Cat (FIG. 2C). As both plasmids express two nearly identical proteins, their relative fitness cost in the absence of antibiotic should be minimal. In the presence of either antibiotic, R3 and R4 should confer different fitness benefits.

[0471] Bacteria containing a starting R3 content of 39% maintained a steady R3:R4 ratio in conditions lacking antibiotic and responded to the presence of chloramphenicol or kanamycin by shifting the plasmid ratio in a highly reproducible, dose-dependent manner favoring the plasmid with the corresponding functional resistance domain (FIG. 9). These results indicate that the information stored in the ratio of R3 and R4 can be reset in either direction using exogenous small molecules. By successively exposing cells to media containing either kanamycin (to reset the R3:R4 ratio to a high level) or aTc+IPTG (to induce Cas9+sgRNA production and cleave R3, lowering the R3:R4 ratio), three successive rounds of erasing and recording using CAMERA 1.2 were performed, with strong response levels in each round (FIG. 2C), demonstrating that this system can be used repeatedly to record and erase exposure to stimuli.

[0472] An alternative resetting mechanism was developed in CAMERA 1.3 that is independent of antibiotic resistance by including a second sgRNA circuit. In addition to one guide RNA cassette (sgRNA1) present in writing plasmid W1.2 that targets R3, a second guide RNA expression unit was incorporated (sgRNA2) under the control of a rhamnose-inducible promoter (P_{Rha}) to generate writing plasmid W1.3. The Cas9:sgRNA2 complex targets plasmids R4. Similar to the recording process in which the expression of sgRNA1 controlled by IPTG results in the loss of R3, the transcription of sgRNA2, induced by rhamnose, should lead to the cleavage of R4, and thus restore plasmid R3 levels. Indeed, E. coli strain S1030 that carried 36% or 77% of R3 successfully went through multiple rounds of recording and erasing upon alternating exposure to rhamnose or IPTG (FIG. 2D, and FIG. 10). In addition, the strength of the stimulus (here, the concentration of rhamnose or IPTG) was reflected in the rate of R3:R4 change (FIG. 2E).

[0473] HTS analysis of the recording plasmids after the final round of resetting and recording reveal a minimal frequency (≤0.06%) of insertions and deletions (indels) (Table 1), suggesting that Cas9-mediated DNA cleavage does not substantially induce random mutations in the plasmid compensation system in bacteria, and both the recording and erasing processes result in minimal loss of future recording or erasing function. Taken together, these results validate CAMERA 1.2 and 1.3 as rewritable, durable cellular memory devices with distinct resetting mechanisms.

### Base Editing Mediates Recording in CAMERA 2

[0474] Base editors, chimeric proteins consisting of a DNA base modification enzyme, a catalytically impaired CRISPR nickase, and a base excision repair inhibitor (12, 22-24) have been recently developed. Base editors efficiently introduce single C·G to T·A mutations at guide RNA-programmed loci in a wide variety of eukaryotic cells and organisms (12, 13, 25-30). Predictable, durable point mutation of genomic or plasmid DNA by base editing has the potential to serve as an ideal information carrier in synthetic memory devices (FIG. 3A). To incorporate a base editor in CAMERA, first, base editing in E. coli was characterized, as base editors have not been extensively used in prokaryotic cells. Since bacteria lack nick-directed mismatch repair exploited by the third-generation base editor (BE3), the second-generation base editor (BE2) was used that contains a cytidine deaminase fused to a catalytically dead Cas9 (dCas9), rather than to a Cas9 nickase, as the protein component of the writing complex (12).

[0475] In writing plasmid 2.0 (W2.0), BE2 expression is induced by aTc and sgRNA1 is constitutively transcribed (FIG. 3A). To test whether CAMERA 2.0, constructed using W2.0 and recording plasmid R1, can faithfully record the amplitude and duration of an exogenous signal, the bacterial culture was treated with aTc at different concentrations and diluted repeatedly to ensure constant expression of the writing complex. When complexed with BE2, sgRNA1 introduces a C·G to T·A mutation at position 166 of the EGFP gene in recording plasmid R1. As anticipated, base editing occurred in an analog mode and the total percentage of modified base increased with bacterial passage number in a highly linear and remarkably reproducible relationship (FIG. 3B). This observation indicates that base editing with BE2 in bacteria is robust and cumulative, reflecting the duration of exposure to the stimulus that induces expression of the writing complex (FIG. 3B). Moreover, the rate of editing can be controlled in a dose-dependent manner (FIG. 3B). By the end of the experiment (68 passages), 66% editing was observed with 200 ng/mL aTc and no significant decrease in editing rate was observed as the recording proceeded, suggesting that given enough time, base editing could approach 100% in bacteria (FIG. 3B).

[0476] Importantly, editing at the target locus accumulated at a slow but constant rate when aTc was present at a low concentration of 2 ng/mL (FIG. 3B). Under these low induction conditions, only 12% of the total recording range (G·C to A·T conversion at position 166 of the EGFP gene) was consumed by bacterial generation 68 (FIG. 3B), suggesting that CAMERA 2.0 can function as a molecular clock that records over hundreds of generations. Collectively, these findings establish CAMERA 2.0 is a highly responsive analog memory device that uses base editing to faithfully record the amplitude and the duration of an exogenous signal in the form of single nucleotide changes over long time scales.

### Recording of Multiple Stimuli Using CAMERA 2 Systems

[0477] Additional base editor writing plasmids W2.1, W2.2 and W2.3 were constructed by replacing the Lac promoter of the guide RNA in writing plasmid W2.0 with promoters regulated by IPTG, arabinose, and rhamnose, respectively, to generate devices CAMERA 2.1, 2.2, and 2.3 (FIG. 3C, and FIG. 11). Similar to CAMERA 2.0, writing promoted by the BE2:sgRNA1 complex in CAMERA 2.1 occurred in a highly reproducible, predictable, and dose-dependent manner (FIG. 3C). The leaky transcription of the TetO promoter enabled very slow but steady recording in the absence of aTc, whereas the recording space was consumed at a much faster speed at the presence of both IPTG and aTc (FIG. 3C).

[0478] To test whether the information recorded in CAMERA can be used to deduce the total exposure time of the device to a stimulus, bacteria carrying CAMERA 2.0 were passed for 40 generations and either the first 20 generations or the second 20 generations were treated with 100 ng/mL aTc (FIG. 3D). The accumulation rate of editing at position 166 of the EGFP gene was strongly determined by exposure duration, and the presence or absence of aTc within a certain time window could be determined by comparing the editing rate of the sample with those of control samples that were always exposed to, or always shielded from, the stimulus (FIG. 3D). Similarly, bacteria carrying CAMERA 2.1 were treated with 0.5 mM IPTG for either the first half or the second half of the total incubation time (FIG. 3E). The editing rate strongly correlated with the presence of IPTG and the total accumulated editing frequencies in the two groups were nearly identical by the end of the experiment, suggesting that the information recorded by CAMERA 2.1 faithfully reflected the duration of exposure to the signal, regardless of when the exposure took place (FIG. 3E). Collectively, these observations confirm the robustness and reproducibility of the recording process and suggest that the extent of base editing at a known time point can be used to deduce the dose of the stimulus, and that the stimulus duration can be calculated from the total base editing conversion if the stimulus dose is known.

[0479] The presence of both aTc and a second stimulus is required for CAMERA 2.1, 2.2, and 2.3 to initiate recording, a process that mimics the behavior of an “AND” gate. Indeed, in the absence of stimuli, CAMERA 2.2 showed no detectable activity, with ≤0.1% C·G to T·A editing at position 186 of the EGFP gene (FIG. 11). Neither arabinose nor aTc by itself increased editing significantly (FIG. 11). However, the presence of both inducers resulted in 9.0% C·G to T·A conversion after 24 hours (FIG. 11), suggesting that CAMERA 2.2 functions as a tightly regulated “AND” gate. Similarly, both rhamnose and aTc were required to initiate recording at position 186 of the EGFP gene by CAMERA 2.3 (FIG. 11). The recording efficiency was tested at different concentrations of rhamnose in the presence of 200 ng/mL aTc and it was confirmed that C·G to T·A conversion at position 195 correlated well with the dose of rhamnose (FIG. 11), again demonstrating that signal intensity can be faithfully recorded and stored by CAMERA 2 systems.

[0480] One advantage of adapting CRISPR technologies to build synthetic memory devices is that multiple stimuli in theory can be recorded using multiple guide RNA units. To test whether CAMERA can simultaneously record multiple independent signals, all three small molecule-responsive guide RNA expression circuits from writing plasmids W2.1-2.3 were integrated into writing plasmid W2.4. Bacteria carrying CAMERA 2.4 were treated with different combinations of the four small-molecule inducers and indeed, editing at the designated EGFP positions could be used to predict the presence of the corresponding writing complexes and hence their corresponding stimuli (FIG. 3F). Thus the fidelity of the device is not compromised even in more complicated environments in which more than two stimuli are provided, suggesting that CAMERA 2 is a versatile and multiplexable memory device.

### Recording Event Order Using CAMERA 2 Systems

[0481] Memory devices that are capable of recording the order of biological events are of great interest (3), as the order of changes in a cell's environment or in the state of a cell can strongly determine cell fate (31). Murray and coworkers recently described a two-input temporal logic gate to record the order and timing of inputs, but the limited number of possible output states (GFP, RFP, or neither) necessitated the sharing of the same output among five different combinations of ordered inputs, complicating the assignment of multiple cell states (32). It was hypothesized that CAMERA 2 systems could record events that occur in a specific order by overlapping two base editing targets such that base editing of DNA target 1 mediated by writing complex 1 (BE2:sgRNA5) is required before DNA target 2 can be recognized by writing complex 2 (BE2:sgRNA6). To test this possibility, CAMERA 2.5 was constructed, in which the order of exposure to two small molecule inducers, arabinose and rhamnose, could be recorded (FIG. 4A). The three arabinose-induced C·G to T·A modifications resulting from base editing by writing complex 1 are located within target site 2 near its PAM. Rhamnose-induced sgRNA6 targets target site 2 only after modification by writing complex 1, but should not edit this site before base editing by writing complex 1 has taken place (FIG. 4A). Thus base editing at position 216 should only be initiated if rhamnose (stimulus 2) was provided after arabinose (stimulus 1), but not if the order of stimuli is reversed.

[0482] By using an additional target site of sgRNA 6 spanning positions 116-135 of a modified EGFP gene, CAMERA 2.5 is further equipped with the ability to independently record two stimuli (FIG. 4A). While editing at positions 205-207 and 129 record exposure to arabinose and rhamnose (FIG. 4B and FIG. 12), respectively, the ratio of base editing at position 216 compared to position 129, both promoted by writing complex 2, reflects the order of application of the two stimuli (FIG. 4C). The activating treatment order of arabinose followed by rhamnose resulted in a position 216:129 base editing ratio of 0.54. When the treatment order was reversed such that rhamnose exposure precedes arabinose, this ratio was 6.8-fold lower (0.08) (FIG. 4C). Together, these results indicate that CAMERA 2.5 can record cellular events in a strongly order-dependent manner.

### Recording of Phage Infection and Light Using CAMERA 2.0 Derivatives

[0483] The CAMERA 2.0 architecture in bacteria was applied to sense viral infection of host cells by bacteriophage, and exposure to light. A phage shock promoter (PSP) driving sgRNA1 transcription was included in CAMERA 2.6 (FIG. 4D) (33, 34). Without phage infection, 9% base editing was observed at EGFP position 166 (FIG. 4D), consistent with previous reports of background transcriptional activity of PSP in the absence of phage (35). Base editing at position 166 increased 4.7-fold to 42% following infection with phage (FIG. 4D). Similarly, using a light-responsive expression system based on light-inhibited interaction of YF1 and FixJ and activation of P_{FixK2}, CAMERA 2.7 could record the presence of light with a 59-fold increase in recording site editing efficiency (FIG. 4E) (36). These results collectively demonstrate that the CAMERA 2 is capable of recording as single-nucleotide changes in bacterial DNA a wide range of signals, including exposure to antibiotics, nutrients, viruses, and light.

[0484] In principle, the recording process carried out by CAMERA systems should not require a large population of cells because the recording plasmid is present in hundreds of copies in each cell. To test the possibility of recording and reading CAMERA data in small cell populations, how light exposure was recorded by CAMERA 2.7 in a handful of cells as well as at the single-cell level (FIG. 4E and FIG. 13) was characterized. As expected, CAMERA 2.7 reliably recorded bacterial exposure to light in bulk cultures, with editing at EGFP position 166 in ˜10⁶ cells increasing in a linear fashion with light exposure duration (from 1.2% to 57% editing over three days, FIG. 4E). Importantly, reliable recording and signal readout were also achieved using only 100-cell or 10-cell samples throughout the three-day recording process, although larger variations were observed with fewer cells, as expected (FIG. 4E). Even measuring 15 single-cell signals yielded similar average light duration-dependent editing efficiencies as those from bulk cultures (FIG. 13). These data demonstrate that CAMERA can support analog-like recording even in small populations of only 10-100 cells.

### CAMERA 2m Systems Record Cell States in Mammalian Cells

[0485] Finally, a CAMERA 2 variant in human HEK293T cells was tested and an established human safe harbor gene, CCR5 (37), was chosen as the recording locus (FIG. 5A). Three individual sgRNAs were designed that target different regions of the CCR5 gene (CAMERA 2 m.0, FIG. 5B and FIG. 14). Total C·G to T·A editing of 37%, 46%, or 19% was obtained at target positions A, B, or C of the CCR5 gene when using corresponding guide RNAs A, B, or C with BE3 (FIG. 14). The C·G to T·A conversion frequency at each site increased a minimum of 270-fold compared with controls lacking the corresponding guide RNA. Robust multiplexed recording was also achieved using the three sgRNAs in all possible combinations and less than 0.07% editing was observed at any site for which the corresponding guide RNA was not supplied, suggesting that base editing cross-talk between guide RNAs is minimal in these human cells.

[0486] By placing BE3 expression under doxycycline-induced control, the presence of the drug was recorded in the CCR5 loci with a base editing frequency 60-fold higher than in cells that never encountered doxycycline (CAMERA 2 m.1, FIG. 5C). Further, by placing sgRNA expression under TetR and LacI suppressed promoters, CAMERA 2 m.1 recorded the presence of both doxycycline and IPTG at different positions in the CCR5 loci (CAMERA 2 m.2, FIG. 5D), confirming that CAMERA 2m can be multiplexed to record combinations of inputs in human cells.

[0487] The Wnt signaling pathway (also known as a signaling cascade) plays a crucial role in embryonic development and aberrant Wnt signaling is associated with a variety of diseases in humans (38). A recording of Wnt signaling was sought using CAMERA 2m in human cells. To achieve this goal, the expression of BE3 was placed under a (LEF-TCF)₇ promoter (39) that responds to Wnt signaling to initiate downstream gene expression in CAMERA 2 m.3. Cells transfected with CAMERA 2 m.3 were treated with LiCl, a GSK3 inhibitor that has been demonstrated to activate Wnt signaling (FIG. 5E) (40). A (LEF-TCF)₇—BE3-P2A-Luc construct that expresses a firefly luciferase protein together with BE3 was included so that Wnt could be monitored simultaneously by luminescence and by high-throughput sequencing of the CCR5 recording locus. As expected, cells transfected with (LEF-TCF)₇—BE3-P2A-Luc exhibited a large (140-fold) increase in Wnt signaling-driven luciferase expression upon LiCl treatment (FIG. 15). This increase in Wnt signaling was permanently recorded by a 53-fold increase in base editing at the CCR5 locus upon LiCl treatment (FIG. 5E). These results demonstrate that Wnt signaling, a major endogenous mammalian signaling pathway, can be recorded by CAMERA 2m in human cells.

### Recording of Endogenous Pathways in Mammalian Cells

[0488] In order to evaluate the versatility and applicability of methods provided herein, the CAMERA 2 system, as employed in the Wnt pathway hereinabove, was used in human cells (HEK293T) and validated with exogenous stimulatory molecules (i.e., peptides, small molecules, and/or antibiotics) by observing single-base changes at the safe-harbor locus in the human genome and/or by luciferase luminescence. Briefly, and similarly as above, the expression of the base editor (e.g. BE3) was driven by a promoter responsive to the specific pathway to being recorded (e.g., see NFκB, CREB, SMAD, etc. in FIG. 16 and Table 10) to initiate downstream gene expression in CAMERA 2 m.3-transfected cells. Such cells were then treated with a stimulator in accordance with the pathway of interest, as described in FIG. 16 and Table 10 (e.g., TNFα, forskolin, TGFβ, etc.). As expected, cells pathway-specific-CAMERA 2 m.3-transfected cells exhibited significant base editing at the CCR5 locus upon treatment with the pre-determined stimulus. By following multiple critical endogenous pathways, CAMERA enables construction of complex cell-state maps providing crucial insights into many biological processes. Indeed, stimulation with exogenous molecules in not essential for recording as CAMERA are able to sense and record endogenous fluctuations related to environmental and cell state changes. The promoter sequences listed in Table 10 comprise a mini-promoter at the end that has very low basal activity.

### Tuning the Sensitivity of CAMERA 1.0

[0489] E. coli strain S1030 was co-transformed with a 10:10:1 mixture of plasmids R1:R2:W1.0.1. 24 colonies were selected to contain both the recording and writing plasmids and analyzed their R1:R2 ratios by high-throughput sequencing (HTS). Complete depletion of R1 was observed for 22 colonies, and the average R1 content was 4.9% (FIG. 6), suggesting that the recording system is so sensitive to the presence of the Cas9:sgRNA complex that the modest amount of leaky transcription from the uninduced TetO promoter resulted in enough Cas9:sgRNA to deplete R1 during colony formation.

[0490] To tune the sensitivity of the recording system, the RBS was swapped for the Cas9 gene from SD8 to the much weaker variants sd2 and sd2U, which are reported to have translation initiation strength of 1% and 0.02%, respectively, relative to SD8 (43), resulting in writing plasmids W1.0.2 and W1.0.3 (FIG. 6). E. coli strain S1030 was transformed with a 10:10:1 mixture of the recording plasmids R1:R2:W1.0.2 or W1.0.3, and 24 colonies which resulted from each transformation by HTS were analyzed. In bacteria containing writing plasmid W1.0.2, only 1 out of 24 colonies (4.2%) contained both R1 and R2, while 23 of 24 colonies had depleted R1 below detectable levels. Among colonies containing W1.0.3 with the weakest RBS mediating Cas9 translation, 5 out of 24 colonies (21%) contained both R1 and R2 (FIG. 6). The average R1 content did not exceed 10% in any transformation with W1.0.1, W1.0.2 or W1.0.3 (FIG. 6), indicating a strong trend of R1 depletion. To confirm that the observed R1 deletion was a result of the presence of the Cas9:sgRNA complex rather than plasmid transformation bias, control writing plasmid W1.0.1c was constructed by replacing the guide RNA spacer in W1.0.1 with an unrelated sequence so that the resulting sgRNA can no longer direct Cas9 to selectively cleave R1. E. coli strain S1030 was transformed with R1, R2, and W1.0.1c. Under these conditions, the coexistence of R1 and R2 was confirmed in 23 of 24 colonies (96%) with an average R1 content of 46% that is similar to the starting R1 content of 50% (FIG. 6), suggesting that the R1 depletion in bacteria containing writing plasmids was indeed a consequence of sgRNA-programmed targeting of R1 by Cas9.

[0491] To further increase the likelihood of harvesting colonies with the intact recording system that contains both R1 and R2, the input ratio of R1: R2 was adjusted from 1:1 to 5:1. It was hypothesized that by increasing the amount of substrate for the Cas9:sgRNA complex, the speed of R1 depletion could be slowed down, favoring the formation of colonies that contained both recording plasmids. Indeed, starting with a 5:1 R1:R2 ratio substantially increased the frequency of colonies that contained both R1 and R2 after transformation (FIG. 6). For cells transformed with a 10:2:1 mixture of R1:R2:W1.0.3, an average R1 content of 46% was observed and 19 out of 24 colonies (79%) were confirmed to contain both R1 and R2 (FIG. 6). The control transformation of 10:2:1 R1:R2:W1.0.1c again resulted in an R1 content similar to the R1:R2 input ratio (FIG. 6). Based on these results, writing plasmid W1.0.3 and recording plasmids R1 and R2 were chosen to assemble CAMERA 1.0.

### Recording of Multiple Stimuli Using CAMERA 2.4

[0492] Minimal editing was observed in the absence of inducers, indicating that CAMERA 2.4 has a very low rate of background writing (FIG. 3F). The presence of aTc resulted in 7.7%, 0.69% and 0.55% editing at position 166, 186 and 195, corresponding to a 45-, 22- and 5-fold activation compared to the background editing, respectively (FIG. 3F). The addition of IPTG and aTc, however, boosted base editing at position 166 to 30%, 176-fold higher than the background editing at this position and 3.9-fold higher than the condition in which only aTc was provided (FIG. 3F). The presence of arabinose or rhamnose together with aTc initiated the recording driven by writing complexes 2 and 3 and resulted in 9.9% and 15.8% editing at position 186 and 195, respectively (FIG. 3F), representing a ≥330-fold and ≥144-fold increase over the background editing frequency at these two positions, and 14-fold and 29-fold higher base editing frequency than when the bacteria were treated with aTc only (FIG. 3F). When any two guide RNAs were transcribed together with BE2 from the presence of aTc plus any two of the three sgRNA inducers, significant base editing was observed at the two corresponding positions with minimal change (0.23%) at the third position, for which the inducer was absent (FIG. 3F), demonstrating that cross-talk between different writing complexes is minimal. Recording was initiated at all three target sites in the presence of all four small molecules (aTc, IPTG, arabinose, and rhamnose).

### Recording Event Order Using CAMERA 2.5

[0493] E. coli S1030 carrying CAMERA 2.5 were tested for the recording outcome when stimuli were applied in different orders. Both the first and second treatments included three conditions: 1) no inducer, 2) arabinose, or 3) rhamnose, and the information recorded at position 129, 205-207 and 216 in CAMERA 2.5 was used to trace back to the presence of rhamnose and arabinose as well the order of the 2 events (FIG. 4A and FIG. 11). Base editing at position 205-207 in recording plasmid R5 recorded the presence of arabinose (FIG. 4B). When rhamnose was provided in either the first or the second treatment, more than 12% editing was observed at position 129, compared to ≤3.4% editing in bacteria that never encountered rhamnose (FIG. 11). However, only in cases where rhamnose was added following the arabinose treatment, significant editing of 6.5% was accumulated at position 216 (FIG. 11). In all six other cases lacking one inducer or treated with both inducers in the other order, ≤3.2% editing at position 216 was observed (FIG. 11). As sgRNA6 has two potential target sites in CAMERA 2.6, the total editing catalyzed by writing complex 2 is divided between positions 129 and 216 once G205-207 are modified. The editing ratio at position 216:129 in all 4 conditions in which bacteria were treated with rhamnose was quantified. The desired treatment order of arabinose followed by rhamnose resulted in an position 216:129 base editing ratio of 0.54, while this ratio was ≤0.09 in the absence of arabinose, or if the treatment order was reversed (FIG. 4C), suggesting that this base editing ratio serves as a reliable readout of event order in CAMERA 2.5.

### Recording the Exposure to Light Using CAMERA 2.7 at the Single-Cell Level

[0494] The behavior of CAMERA 2.7 was characterized at the single-cell level (FIG. 13). With 15 randomly sorted individual cells, similar average light duration-dependent editing efficiencies were observed as from bulk cultures (FIG. 13). It was noticed that the editing variation between individual cells was smaller when only a small portion of the recording space was consumed (day 0 and 1, FIG. 13). However, significant editing polarization was observed as the recording process went on, likely because some cells were more active in base editing and in these cells the recording position was fully edited faster than in the rest of the cells (FIG. 13). Cells that lagged behind seemed to require a longer initiation period and the recording only started at later time points. By the end of day 3, all 15 characterized cells passed the initiation phase and exhibited different levels of editing (FIG. 13). In addition, editing in bulk cell cultures approached 100% after multiple days of culturing, suggesting that there are few unresponsive cells during the recording process.

### Discussion

[0495] Synthetic memory devices were developed that record events of interest in live cells using two distinct CRISPR-mediated DNA modification mechanisms: Cas9 nuclease-catalyzed double-stranded DNA cleavage, and base editor-mediated C·G to T·A point mutation. Both CAMERA systems record the amplitude and duration of stimuli permanently in DNA of live cells. The analog nature of both recording systems allows the continuous monitoring of signals of interest and provides much more information compared to canonical digital memory devices.

[0496] In CAMERA 1 systems (Table 2), information is recorded in a form of plasmid R1:R2 ratio. Because R1 but not R2 expresses a functional fluorescent protein, information stored in CAMERA 1 systems can be read out transiently by monitoring post-recording cellular fluorescence in addition to the permanent readout by HTS. During the development of CAMERA 1, the RBS strength of Cas9 was decreased by four orders of magnitude to slow down the recording process to speeds convenient for study, indicating that these systems can respond quickly and are highly sensitive. This exceptional sensitivity may enable recording of very weak environmental signals that would otherwise be difficult to detect using other methods. In addition, two independent strategies were developed to reset CAMERA 1 systems that allow repeated cycles of erasing and rewriting using a single device.

[0497] CAMERA 2 systems (Table 2) translate stimuli of interest into single-nucleotide modifications. The devices can be multiplexed by stacking multiple responsive sgRNA units and it was demonstrated that four exogenous signals could be recorded using CAMERA 2.4 independently. Importantly, using a “racheted” overlapping protospacer design, CAMERA 2.5 can record events in an order-dependent manner, a capability that is difficult to envision using other synthetic memory devices. By including environment-responsive circuits, virus infection and light exposure have also been faithfully recorded using CAMERA 2.6 and 2.7. It was also demonstrated that CAMERA recording to high-copy plasmids maintains its reliability even in samples containing only 10-100 cells. The mammalian cell compatibility of base editing enables CAMERA 2m systems to function in human cells, including its use to record both exposure to external stimuli and flux through an endogenous signaling pathway. The development of additional inducible gene regulation circuits will enable CAMERA systems with even broader and more complex recording scopes.

[0498] Incorporating the recently developed ABE that mediates A·T to G·C base editing (23) could expand the versatility of CAMERA 2 systems by adding an additional dimension of recording that also can reverse directly the edits introduced by BE3. By using low-level writing, CAMERA systems might serve as molecular clocks to record cellular life span as well as signals of interest that persist for long periods of time. CRISPR technology has been applied in mammalian cells for molecular recording of exogenous signals and mapping cell linage using genomically integrated circuits (41, 42). CAMERA systems are not dependent on genomic integration of barcoded “scratchpads” that could result in undesired cellular perturbations. The use of base editors in CAMERA 2 systems minimizes stochastic indels and translocations that arise from double-stranded DNA breaks. These systems are envisioned being used for applications such as recording the presence of low-abundance extracellular and intracellular signals, mapping the linage of specific cell types, and constructing complex cell-state maps.

### Materials and Methods

### Cloning and Plasmids

[0499] Oligonucleotides were ordered from Integrated DNA Technologies. PCR fragments for plasmid construction were amplified using PhuU polymerase (ThermoFisher Scientific) and assembled by USER enzyme mix (New England Biolabs) according to the manufacturer's instructions. All DNA cloning was performed with NEB Turbo cells (New England Biolabs). Plasmids used in this work (see Table 3 for plasmid design specifics) are available from Addgene. Primers used for high-throughput sequencing are listed in Table 6.

### Strains and Chemicals

[0500] All bacterial CAMERA devices developed in this work were tested with E. coli strain S1030 (44) with the exception of CAMERA 2.6, which was characterized in E. coli strain S2063. The complete genotypes of S1030 and S2063 are listed in Table 4. Unless otherwise noted, antibiotics were used at the following concentrations: carbenicillin (100 mg/ml), kanamycin (50 mg/ml), chloramphenicol (25 mg/ml), and spectinomycin (100 mg/ml). All chemicals were purchased from Sigma-Aldrich and Fisher Scientific.

In Vitro Cleavage of dsDNA by Cas9

[0501] SpCas9 protein was purified as previously described (45). Guide RNAs were transcribed using a T7 High Yield RNA Synthesis Kit (New England Biolabs) and purified with the E.Z.N.A. PF miRNA Isolation Kit (Omega Bio-tek, Inc.). The target dsDNA (full EGFP gene) was amplified by polymerase chain reaction using Q5 DNA polymerase (New England Biolabs) and purified by QIAquick PCR Purification Kit (Qiagen). For the cleavage reaction, 10 nM of the target DNA was incubated with 100 nM sgRNA in the presence of 100 nM Cas9 protein in a Cas9 DNA cleavage buffer (150 mM KCl, 10 mM MgCl2, 0.5 mM DTT, 0.1 mM EDTA, 20 mM HEPES pH 7.5). The reactions were incubated at 37° C. for 1 hour before being stopped with 6×DNA loading buffer and analyzed by non-denaturing agarose gel electrophoresis.

Stable Maintenance of R1 and R2 in E. coli S1030

[0502] E. coli S1030 were transformed with a mixture of 500 ng R1 and 500 ng R2 and plated on LB agar containing carbenicillin. A total of eight colonies were picked and grown to dense cultures in LB media. The R1/R2 ratio was analyzed by amplifying the EGFP gene from the cultures and sequencing using HTS. Two bacterial cultures with different R1 content (29% and 60%) were selected and validated for the recording plasmid maintenance. The starting bacterial culture was split into three cultures in parallel and diluted 1,000-fold into fresh LB media. The diluted cultures were grown at 37° C. with shaking for 16-24 hours to saturation before being diluted again. The dilution process (500- or 1,000-fold) was repeated until 56 generations of bacteria were produced. The EGFP fragment was amplified from the dense bacterial cultures after each round and analyzed for the R1 content using HTS.

Measuring the Growth Rates of Parental E. coli S1030 and E. coli S1030 Transformed with the Recording Plasmids

[0503] Parental E. coli S1030 or E. coli S1030 containing the recording plasmid pair in different starting ratios were inoculated into LB or LB containing 100 g/mL carbenicillin, respectively, and grew at 37° C., 220 rpm overnight. The dense cultures were inoculated at a ratio of 1:1,000 into 4 mL fresh LB with or without 100 g/mL carbenicillin in a 24-deep-well plate. Three individual cultures were prepared for each growth condition and allowed to grow at 37° C., 220 rpm. At designed time points, 200 L of the bacterial cultures were transferred from the 24-deep-well plate into a 96-well assay plate with clear bottom and the absorbance at 600 nm was measured using a TECAN Infinite M1000 Pro plate reader.

Setting Up CAMERA 1.0 in E. coli S1030

[0504] For the initial validation of CAMERA 1.0, E. coli S1030 were transformed with a mixture of 500 ng R1, 500 ng R2 and 100 ng W1.0.1, W1.0.2, W1.0.3, or W1.0.1c. The transformed bacteria were plated on LB agar containing carbenicillin and spectinomycin. A total of 24 colonies were picked and grown to dense cultures. The R1/R2 ratio was analyzed by amplifying the EGFP gene from the cultures and sequencing using HTS. To help maintaining R1 during colony formation, E. coli S1030 were transformed with a mixture of 800 ng R1, 200 ng R2 and 100 ng W1.0.1, W1.0.2, W1.0.3, or W1.0.1c. A total of 24 colonies formed on LB agar containing carbenicillin and spectinomycin were picked, grown in LB and analyzed for their R1/R2 ratios.

[0505] The E. coli culture carrying CAMERA 1.0 with 42% R1 and 58% R2 was split into three cultures and inoculated in a 1:500 ratio (v/v) into fresh LB media containing 200 ng/mL aTc and grown at 37° C. with shaking. The bacteria were harvested 3 hours and 6 hours after inoculation and the R1/R2 ratio was analyzed by amplifying the EGFP fragment and sequencing using HTS.

Characterization of CAMERA 1.1 in E. coli S1030

[0506] E. coli S1030 were transformed with a mixture of 500 ng R1, 500 ng R2 and 100 ng W1.1 and plated on LB agar containing carbenicillin and spectinomycin. A total of eight colonies were picked, grown to dense cultures and analyzed for their R1 content. The bacterial culture carrying CAMERA 1.1 with 23% R1 and 77% R2 was selected for further test and split into three individual cultures. The bacterial cultures were inoculated 1:500 (v/v) into fresh LB media containing 1) no inducer, 2) 100 ng/mL aTc, 3) 500 μM IPTG, and 4) 100 ng/mL aTc and 500 μM IPTG. The treated bacteria were allowed to grow at 37° C. with shaking for 3 hours and the R1/R2 ratio was analyzed by amplifying the EGFP fragment and sequencing using HTS.

[0507] To characterize the analog behavior of CAMERA 1.1, the starting cultures were inoculated 1:100 (v/v) into fresh LB media containing 0, 2, 5, 10, 20, 30, 40, 60, 80, 100, or 150 μM IPTG in the presence of 50 ng/mL aTc. The treated bacteria were allowed to grow at 37° C. with shaking for 4 hours and the inducers were removed by diluting the culture in a 1:250 ratio with fresh LB and culturing overnight. The resulting R1/R2 ratio in the bacterial culture was analyzed by amplifying the EGFP gene and sequencing in a high throughput manner. To induce the EGFP expression as a transient readout, the bacterial culture was diluted again in a 1:125 ratio with fresh LB containing 0.25 mM arabinose. EGFP fluorescence was measured after 4 hours of induction using a TECAN Infinite M1000 Pro plate reader with excitation/emission wavelength set to 485/530 nm.

### Recording and Erasing of CAMERA 1.2

[0508] E. coli S1030 were transformed with 500 ng of R3 and 500 ng of R4. The transformed bacteria were plated on LB agar containing 50 μg/mL kanamycin and 25 μg/mL chloramphenicol to select for the presence of both plasmids. A total of eight colonies were picked, grown in fresh LB and analyzed for their R3 content. The bacteria containing 38% R3 and 62% R4 were selected to test whether antibiotic treatment could promote the R3:R4 ratio shift. The selected bacterial culture was split into two individual cultures and diluted 1:30 into fresh LB media containing 0.4, 0.8, 1.2, or 1.6 mg/mL kanamycin or 100 μg/mL chloramphenicol. The process was repeated one more time before the resulting bacteria were analyzed for their R3 content.

[0509] To perform recording and device resetting using CAMERA 1.2, E. coli S1030 were transformed with 500 ng R3, 250 ng R4 and 100 ng W1.1 and plated on LB agar containing 25 μg/mL kanamycin, 10 μg/mL chloramphenicol and 100 μg/mL spectinomycin. A bacterial colony carrying CAMERA 1.2 with 36% of R3 and 64% of R4 was selected for further characterization and split into three independent cultures. To initiate the recording process, the bacterial culture was inoculated 1:30 into fresh LB media containing 50 ng/mL aTc and 100 μM IPTG, whereas to reset the device, a similar inoculation protocol was performed with fresh LB media containing 0.8 mg/mL kanamycin. The inoculated culture was allowed to grow at 37° C. with shaking for 12-24 hours to saturation. The process was repeated until a desired R3:R4 ratio was obtained. The R3 content was characterized by HTS analysis of the EGFP fragment amplified from the bacterial culture.

### Recording and Device Resetting Using CAMERA 1.3

[0510] E. coli S1030 were transformed with 210 ng R3, 70 ng R4 and 40 ng W1.2 and plated on LB agar containing 10 μg/mL kanamycin, 5 μg/mL chloramphenicol and 100 μg/mL spectinomycin. Two bacterial colonies carrying CAMERA 1.3 containing 36% and 77% R3 were selected and grown into three independent cultures for the recording and resetting tests. The bacterial cultures were inoculated 1:1,000 into fresh LB media containing 100 ng/mL aTc and 100 μM IPTG or 100 ng/mL aTc and 5 mM rhamnose for recording or resetting purposes. The process was repeated once if the desired R3:R4 ratio was not reached. To titrate the recording and resetting speed, the E. coli S1030 cultures carrying CAMERA 1.3 with 36% R3 were diluted in a 1:1,000 ratio in fresh LB media and treated by 100 ng/mL aTc and 0.2, 0.5, 1, or 5 mM rhamnose. The bacteria were allowed to grown into dense cultures at 37° C. with shaking for 24 hours. Once the recording process was finished, the resulting cultures were diluted again and treated with 100 ng/mL aTc and 0.1, 0.25, 0.5, or 2.5 mM IPTG. The bacteria were grown at 37° C. with shaking for 24 hours to bring back the consumed R3. The R3:R4 ratio was characterized by high throughput sequencing analysis of the EGFP fragment amplified from the bacterial culture.

Characterization of CAMERAs 2.0 and 2.1 in E. coli S1030

[0511] E. coli S1030 were transformed with R1 and W2.0 and plated on LB agar containing carbenicillin and spectinomycin. A single colony was picked and cultured at 37° C. with shaking to obtain a dense culture as the starting material of the recording experiments. The split bacterial cultures were diluted 500- or 1,000-fold into fresh LB media containing 0, 2, 20, or 200 ng/mL aTc and grown in a 96-deep-well plate at 37° C. with shaking for 16-24 hours before being diluted again. The process was repeated until 68 generations of bacteria were produced. Editing promoted by the BE2:sgRNAa complex was characterized by amplifying the EGFP gene from the bacterial culture and analyzing the amplicon using HTS.

[0512] E. coli S1030 carrying CAMERA 2.1 were treated with 1) no inducer, 2) 1 mM IPTG, 3) 200 ng/mL aTc and 1, 0.1, or 0.01 mM IPTG. Similar culturing and characterizing protocol was adapted as that was used for CAMERA 2.0.

[0513] To confirm that CAMERA 2.0 could record the present duration of a stimulus, E. coli S1030 cultures carrying CAMERA 2.0 were diluted 1,000-fold into fresh LB media and treated with or without 100 ng/mL aTc. The bacteria were grown in a 24-deep-well plate at 37° C. with shaking for 12 hours and diluted 1,000-fold again into fresh LB containing the same concentrations of aTc. In the 3rd dilution, bacteria that had not encountered the inducer were split into fresh LB media with or without 100 ng/mL aTc. The process was repeated once in the 4th dilution. Similarly, bacteria that had been treated with aTc were split and treated with or without aTc from generation 20 to 40. E. coli S1030 carrying CAMERA 2.1 were tested for IPTG sensing using a similar set up.

Characterization of CAMERA 2.2 and 2.3 in E. coli S1030

[0514] E. coli S1030 carrying CAMERA 2.2 were diluted 500-fold (v/v) into fresh LB media containing 1) no inducer, 2) 100 ng/mL aTc, 3) 0.1 mM arabinose, and 4) 100 ng/mL aTc and 0.1 mM arabinose in a 96-deep-well plate and grown at 37° C. with shaking for 24 hours before being stopped and characterized for base editing at position 186 of the EGFP gene.

[0515] E. coli S1030 carrying CAMERA 2.3 were diluted 500-fold (v/v) into fresh LB media containing 1) no inducer, 2) 50 ng/mL aTc, 3) 1 mM rhamnose, and 4) 50 ng/mL aTc and 1 mM rhamnose in a 96-deep-well plate and grown at 37° C. with shaking for 24 hours before being stopped and characterized for base editing. The rhamnose concentration was varied from 25 μM to 5 mM in the presence of 50 ng/mL aTc to test the capability of CAMERA 2.3 to record the intensity of the stimulus.

### Recording Multiple Independent Signals Using CAMERA 2.4

[0516] E. coli S1030 carrying CAMERA 2.4 (recording plasmid R1 and writing plasmids W2.4-1 and W2.4-2) were prepared to record four small molecule signals, including aTc (100 ng/mL), IPTG (100 μM), arabinose (100 μM) and rhamnose (1 mM). The bacterial culture was diluted 1:500 by fresh LB media in a 96-deep-well plate and treated with different combinations of inducers and grown at 37° C. with shaking. The bacteria were harvested 24 hours after inoculation and base editing at positions 166, 186, and 195 of the EGFP gene was characterized by HTS.

### Stimulus Order-Dependent Recording Using CAMERA 2.5

[0517] To characterize CAMERA 2.5, E. coli S1030 were transformed with W2.5-1, W2.5-2 and R5 and plated on LB agar containing carbenicillin, spectinomycin and chloramphenicol. A single colony was picked and grown at 37° C. with shaking for 24 hours to obtain a dense culture. The resulting bacteria culture carrying CAMERA 2.5 was split into three independent cultures and inoculated 1:500 into fresh LB media containing 1) no inducer, 2) 100 ng/mL aTc and 100 μM arabinose, or 3) 100 ng/mL aTc and 5 mM rhamnose in a 96-deep-well plate and grown at 37° C. with shaking for 24 hours. The treatment involving 100 ng/mL aTc and 100 μM arabinose was repeated for the following 5 days to allow the editing at positions 205-207 to accumulate. By the end of day 6, the cultures were split and inoculated 1:500 into fresh LB media containing 1) no inducer, or 2) 100 ng/mL aTc and 5 mM rhamnose and grown at 37° C. with shaking for 24 hours. The cultures that had not been treated with any inducers in day 1 were split and inoculated 1:500 into fresh LB media containing 1) no inducer, or 2) 100 ng/mL aTc and 100 μM arabinose. The same inoculation procedure was performed for bacteria that were treated with 100 ng/mL aTc and 5 mM rhamnose in day 1. The same conditions were applied for five more days in a row before all bacteria were harvested for characterization. Editing at positions 129, 205-207, and 216 of the EGFP gene was analyzed by HTS.

Recording Phage Infection Using CAMERA 2.6 in E. coli S2063

[0518] E. coli 52063 were transformed with R1 and W2.6 and plated on LB agar containing carbenicillin and spectinomycin. A single colony was picked and cultured at 37° C. with shaking and split into three independent cultures as the starting materials of the recording experiments. Phage solution (SP54, wild type phage that carries PspB/C) was prepared with a titer of 1010. S2063 carrying CAMERA 2.6 were diluted 1:500 into fresh LB media in 96-deep-well plates and grown at 37° C. with shaking for approximately 4 hours to reach the exponential phase of growth (OD 600 nm=0.5-0.8). The bacteria were then 1:4 (v/v) treated with LB or phage solution. A total of 4 μL treated or LB diluted bacterial culture was inoculated into 0.5 mL fresh LB media in 96-deep-well plates and allowed to grow at 37° C. with shaking for additional 24 hours. Editing at position 166 of the EGFP gene was quantified by HTS.

### Recording Exposure to Light Using CAMERA 2.7

[0519] E. coli S1030 were transformed with R6, W2.7-1, and W2.7-2 and plated on LB agar containing carbenicillin, spectinomycin and kanamycin. A single colony was picked and cultured at 37° C. with shaking and the dense culture was split into three parallel samples to serve as the starting materials of the recording experiments. The bacteria were diluted 1,000-fold into fresh LB media in 24-deep-well plates and grown at 37° C. with shaking. The bacteria were grown either in darkness (wrapped in aluminum foil) or under white light (the built-in fluorescent lamp in the shaker incubator) for 24 hours before being stopped and analyzed for base editing at position 166 of the EGFP gene using HTS.

### Recording Exposure to Light Using CAMERA 2.7 at the Single Cell Level

[0520] E. coli S1030 transformed with R6, W2.7-1, and W2.7-2 (described above) were cultured in darkness at 37° C. with shaking and a saturated culture was used as the starting point for the recording experiment. The culture was diluted 1,000-fold into fresh LB media containing 100 μg/mL carbenicillin, 100 μg/mL spectinomycin.

[0521] and 50 μg/mL kanamycin in a 24-deep-well plate and grown under white light at 37° C., 220 rpm. The bacterial culture was diluted 1,000-fold again into fresh LB after 24 hours and continued to grow under white light. The process was repeated for three consecutive days.

[0522] At the end of each day, a 50-μL aliquot from the culture was removed the shaker, diluted with PBS, and stained with SYTO 17 Red Fluorescent Nucleic Acid Stain (ThermoFisher Scientific) and READIDROP™ Propidium Iodide (Bio-Rad) and sorted using a Beckman Coulter MoFlo Legacy Cell Sorter into 96-well PCR plates, in which 10 μL of water was preloaded to harvest live single cell, 10-cell, or 100-cell samples.

[0523] 96-well plates containing sorted bacteria were heated up to 95° C. for 5 minutes and removed to room temperature, followed by freezing at −80° C. for at least 30 minutes. Samples were then moved to room temperature and allowed to thaw slowly. The heat-freeze-thaw procedure was repeated once to maximize bacterial lysis.

[0524] iTaq™ Universal SYBR® Green Supermix (Bio-Rad) and primers were loaded into the lysed bacterial solution and the polymerase chain reaction was monitored by a qPCR machine (Bio-Rad). A total of 45 cycles of polymerase chain reactions (95° C. 15 seconds, 60° C. 30 seconds and 68° C. 20 seconds) were performed and samples containing 100, 10, and 1 bacteria resulted in Ct values of ˜29, ˜34, and ˜39, respectively. The illumine adapters were added by diluting the 1st PCR reactions and performing additional 7 cycles of PCR. The illumine barcodes were added using a similar procedure by diluting the 2nd PCR reactions and performing additional 7 cycles of PCR. The resulted PCR products were combined and the library was analyzed for base editing at position 166 of the EGFP gene using HTS.

### Recording in the Genomic Safe Harbor Gene CCR5 in Human Cells

[0525] HEK293T cells (GenTarget Inc.) were cultured in 48-well plates (collagen-coated, ˜40,000 cells seeded per well) in DMEM plus GlutaMAX (Life Technologies) with 10% FBS. Transfection was performed 24 hours after plating when cells reached 60-70% confluence. To initiate recording in the human safe harbor gene CCR5, 800 ng of BE3 plasmid and 40 ng of guide RNA plasmid (CAMERA 2 m.0, the guide RNA sequences are listed in Table 5) were transfected in each well using 1.2 μl Lipofectamine 2000 (Life Technologies) following the manufacturer's protocol. To multiplex recording using multiple guide RNAs, each guide RNA plasmid was applied at a dose of 40 ng together with 800 ng of BE3 plasmid. The transfected cells were incubated for additional 3 days before being harvested for genomic DNA extraction. Base editing was quantified by amplifying the CCR5 gene fragment from genomic DNA by PCR and analyzing by HTS.

### Recording the Presence of Doxycycline as Single-Nucleotide Changes in CCR5 in Human Cells

[0526] To test whether CAMERA 2 systems can record the presence of exogenous small molecules in the form of base editing, a doxycycline-inducible promoter was installed in front of BE3 to generate CAMERA 2 m.1 (pTRE3G-BE3). HEK293T cells were transfected with 400 ng pTRE3G-BE3, 20 ng of guide RNA plasmid, and 100 ng of pCMV-Tet3G (Clontech Laboratories, Inc.) using 1 μl Lipofectamine 2000. A stock solution of 1 mg/mL doxycycline was prepared in ddH2O and added to the media 6 hours after transfection. The transfected cells were incubated for additional 3 days before being harvested for genomic DNA extraction. Base editing was quantified by amplifying the CCR5 gene fragment from genomic DNAby PCR and analyzing by HTS.

Recording the Presence of Doxycycline and IPTG Using Multiple Responsive sgRNA Expression Units in HEK293T Cells

[0527] To record the presence of multiple exogenous small molecules in the form of base editing, a LacI-suppressed U6 promoter for sgRNA A (U6LacI-sgRNA A) and a TetR-suppressed H1 promoter for sgRNA B (H1TetR-sgRNA B) (46) were installed. TetR and LacI fused with nucleus localization sequences were placed downstream the human UBC promoter (UBC-TetR-P2A-LacI) in an accessary plasmid. Combined with the pCMV-BE3 plasmid, these components constitute CAMERA 2 m.2 to record the presence of doxycycline and IPTG in human cells.

[0528] HEK293T cells were cultured in 96-well plates (collagen-coated, ˜20,000 cells seeded per well) in DMEM plus GlutaMAX (Life Technologies) with 10% FBS. Transfection was performed 24 hours after plating when cells reached 60-70% confluence. CAMERA 2 m.2 were prepared in 5 μL of reduced serum media (Opti-MEM, Life Technologies) with 200 ng of BE3 plasmid, 100 ng of UBC-TetR-P2A-LacI plasmid, 20 ng of U6LacI-sgRNA A plasmid, and 20 ng of H1TetR-sgRNA B plasmid and transfected using 0.5 μl Lipofectamine 2000. Stock solutions of 1 M IPTG and 1 mg/mL doxycycline were prepared in ddH2O and added to the media 6 hours after transfection. The transfected cells were incubated for additional 3 days before being harvested for genomic DNA extraction and HTS analysis.

### Recording Wnt Signaling in the CCR5 Loci of Human Cells

[0529] To enable CAMERA 2m to record Wnt signaling, a (TCF/LEF)7 promoter was installed upstream BE3 and BE3-P2A-Luc to generate CAMERA 2 m.3 ((TCF/LEF)7-BE3 and ((TCF/LEF)7-BE3-P2A-Luc). TOPFlash ((TCF/LEF)7-Luc) (47) was used as a transient readout of Wnt signaling. A control plasmid that encodes the Renilla luciferase was included to normalize transfection efficiency for luminescence readout.

[0530] HEK293T cells were cultured in 96-well plates (collagen-coated, ˜20,000 cells seeded per well) in DMEM plus GlutaMAX (Life Technologies) with 10% FBS. Transfection was performed 24 hours after plating when cells reached 60-70% confluence. CAMERA 2 m.3 were prepared in 5 μL of reduced serum media (Opti-MEM, Life Technologies) with 200 ng of ((TCF/LEF)7-BE3 or ((TCF/LEF)7-BE3-P2A-Luc plasmids, 20 ng of U6-sgRNA A plasmid and 10 ng of Renilla luciferase plasmid and transfected using 0.5 μl Lipofectamine 2000. TOP-Flash plasmid (200 ng) was transfected using a similar setup without including the guide RNA plasmid. A stock solution of 1 M LiCl was prepared in ddH2O and added to the media to a final concentration of 50 mM 10 hours after transfection.

[0531] Firefly luciferase and Renilla luciferase activities were measured 24 hours after LiCl treatment. Luciferase substrates were purchased from Promega. To characterize Wnt-stimulated base editing, the transfected cells were incubated for 3 days before being harvested for genomic DNA extraction. Base editing was quantified by amplifying the CCR5 gene fragment from genomic DNA by PCR and analyzing by HTS.

### Recording Signaling of Additional Pathways in the CCR5 Loci of Human Cells

[0532] To enable CAMERA 2m to record signaling in additional pathways, the promoters listed in Table 10 were installed upstream BE3 and BE3-P2A-Luc to generate a new CAMERA 2m construct

[0533] HEK293T cells were cultured in 96-well plates (collagen-coated, ˜20,000 cells seeded per well) in DMEM plus GlutaMAX (Life Technologies) with 10% FBS. Transfection was performed 24 hours after plating when cells reached 60-70% confluence. The CAMERA 2m plasmids were prepared in 5 μL of reduced serum media (Opti-MEM, Life Technologies. The triggering molecules identified in Table 10 were added to the cells at the specified concentrations.

[0534] To characterize pathway-stimulated base editing, the transfected cells were incubated for 2-3 days before being harvested for genomic DNA extraction. Base editing was quantified by amplifying the CCR5 gene fragment from genomic DNA by PCR and analyzing by HTS. As seen in FIG. 16, increases in CCR5 editing by the CAMERA 2m system was induced by the presence of each of the triggering molecules.

[0535] The following are some specific numbered embodiments of the invention disclosed herein. These embodiments are exemplary and for the purpose of illustration only. It will be understood that the invention is not limited to the embodiments, but embraces all such forms and combinations thereof as come within the scope of the above disclosure.

[0536] Embodiment 1. A writing plasmid comprising:
[0537] (i) a nucleic acid sequence encoding a nucleic acid programmable DNA binding protein (napDNAbp) operably linked to a first promoter;
[0538] (ii) a nucleic acid sequence encoding a single guide RNA (sgRNA) operably linked to a second promoter, wherein the sgRNA is complementary to a target sequence; and
[0539] (iii) an origin of replication;
   [0540] wherein at least one of the promoters is an inducible promoter, and wherein the sgRNA associates with the napDNAbp under conditions that induce expression of the sgRNA and expression of the napDNAbp.

[0541] Embodiment 2. The writing plasmid of embodiment 1, wherein the first promoter and the second promoter are different promoters.

[0542] Embodiment 3. The writing plasmid of embodiment 1 or 2, wherein the first promoter is a constitutive promoter.

[0543] Embodiment 4. The writing plasmid of embodiment 3, wherein the constitutive promoter is a constitutive Lac promoter.

[0544] Embodiment 5. The writing plasmid of any one of embodiments 1-4, wherein the first promoter is an inducible promoter.

[0545] Embodiment 6. The writing plasmid of embodiment 5, wherein the inducible promoter is an anhydrotetracycline-inducible promoter, IPTG-inducible promoter, rhamnose-inducible promoter, or arabinose-inducible promoter.

[0546] Embodiment 7. The writing plasmid of embodiment 1, wherein the napDNAbp is a Cas9 domain, a Cpf1 domain, a CasX domain, a CasY domain, a C2c1 domain, a C2c2 domain, or a C2c3 domain.

[0547] Embodiment 8. The writing plasmid of embodiment 7, wherein the Cas9 domain is a nuclease inactive Cas9 (dCas9) domain, a Cas9 nickase (Cas9n) domain, or a nuclease active Cas9 domain.

[0548] Embodiment 9. The writing plasmid of embodiment 8, wherein the Cas9 domain is a Cas9 domain from Streptococcus pyogenes (spCas9).

[0549] Embodiment 10. The writing plasmid of any one of embodiments 7-9, wherein the Cas9 domain comprises an amino acid sequence that is at least 90% identical to the amino acid sequence provided in any one of SEQ ID NOs: 10-260.

[0550] Embodiment 11. The writing plasmid of any one of embodiments 7-9, wherein the Cas9 domain comprises the amino acid sequence of any one of SEQ ID NOs: 10-260.

[0551] Embodiment 12. The writing plasmid of embodiment 1 or 2, wherein the second promoter is a constitutive promoter.

[0552] Embodiment 13. The writing plasmid of embodiment 12, wherein the constitutive promoter is a constitutive Lac promoter.

[0553] Embodiment 14. The writing plasmid of embodiment 1 comprising: (i) a nucleic acid sequence encoding a napDNAbp operably linked to an inducible promoter, (ii) a nucleic acid sequence encoding a sgRNA operably linked to a constitutive promoter, wherein the sgRNA is complementary to a target sequence, and (iii) an origin of replication, wherein the sgRNA is constitutively expressed, and wherein the sgRNA associates with the napDNAbp under conditions that induce the expression of the napDNAbp.

[0554] Embodiment 15. The writing plasmid of embodiment 14, wherein the inducible promoter is an anhydrotetracycline-inducible promoter, and wherein the constitutive promoter is a constitutive Lac promoter.

[0555] Embodiment 16. The writing plasmid of embodiment 1 or 2, wherein the second promoter is an inducible promoter.

[0556] Embodiment 17. The writing plasmid of embodiment 16, wherein the inducible promoter is an IPTG-inducible promoter, anhydrotetracycline-inducible promoter, rhamnose-inducible promoter, or arabinose-inducible promoter.

[0557] Embodiment 18. The writing plasmid of embodiment 1 comprising: (i) a nucleic acid sequence encoding a Cas9 domain operably linked to a constitutive promoter, (ii) a nucleic acid sequence encoding a sgRNA operably linked to an inducible promoter, wherein the sgRNA is complementary to a target sequence, and (iii) an origin of replication, wherein the Cas9 domain is constitutively expressed, and wherein the sgRNA associates with the Cas9 domain under conditions that induce the expression of the sgRNA.

[0558] Embodiment 19. The writing plasmid of embodiment 1 comprising: (i) a nucleic acid sequence encoding a napDNAbp operably linked to a first inducible promoter, (ii) a nucleic acid sequence encoding a sgRNA operably linked to a second inducible promoter, wherein the sgRNA is complementary to a target sequence, and (iii) an origin of replication, wherein the sgRNA associates with the napDNAbp under conditions that induce expression of the napDNAbp and expression of the sgRNA.

[0559] Embodiment 20. The writing plasmid of embodiment 19, wherein the first inducible promoter is an anhydrotetracycline-inducible promoter, and wherein the second inducible promoter is an IPTG-inducible promoter.

[0560] Embodiment 21. The writing plasmid of any one of embodiments 1-20, wherein the writing plasmid further comprises (iv) a nucleic acid sequence encoding a second sgRNA operably linked to a third promoter, wherein the second sgRNA is complementary to a target sequence, and wherein the second sgRNA associates with the napDNAbp under conditions that induce the expression of the napDNAbp and expression of the second sgRNA.

[0561] Embodiment 22. The writing plasmid of embodiment 21, wherein the first promoter, the second promoter, and the third promoter are different promoters.

[0562] Embodiment 23. The writing plasmid of embodiment 21 or 22, wherein the third promoter is a constitutive promoter.

[0563] Embodiment 24. The writing plasmid of embodiment 23, wherein the constitutive promoter is a constitutive Lac promoter.

[0564] Embodiment 25. The writing plasmid of embodiment 21 or 22, wherein the third promoter is an inducible promoter.

[0565] Embodiment 26. The writing plasmid of embodiment 25, wherein the inducible promoter is a rhamnose-inducible promoter, IPTG-inducible promoter, anhydrotetracycline-inducible promoter, or arabinose-inducible promoter.

[0566] Embodiment 27. The writing plasmid of embodiment 1 comprising: (i) a nucleic acid sequence encoding a napDNAbp operably linked to a first inducible promoter, (ii) a nucleic acid sequence encoding a first sgRNA operably linked to a second inducible promoter, wherein the first sgRNA is complementary to a target sequence, (iii) a nucleic acid sequence encoding a second sgRNA operably linked to a third inducible promoter, wherein the second sgRNA is complementary to a target sequence, and (iv) an origin of replication,
[0567] wherein the first sgRNA associates with the napDNAbp only under conditions that induce expression of the napDNAbp and expression of the first sgRNA, and wherein the second sgRNA associates with the napDNAbp only under conditions that induce expression of the napDNAbp and expression of the second sgRNA.

[0568] Embodiment 28. The writing plasmid of embodiment 27, wherein the first inducible promoter is an anhydrotetracycline-inducible promoter, the second inducible promoter is an IPTG-inducible promoter, and the third inducible promoter is a rhamnose-inducible promoter.

[0569] Embodiment 29. The writing plasmid of any one of embodiments 1-28 for use in a bacterial cell.

[0570] Embodiment 30. The writing plasmid of any one of embodiments 1-29, wherein the origin of replication is suitable for use in a bacterial system.

[0571] Embodiment 31. The writing plasmid of embodiment 30, wherein the origin of replication comprises a pSC101, pMB1, pBR322, ColE1, or p15A origin of replication sequence.

[0572] Embodiment 32. A bacterial cell comprising the writing plasmid of any one of embodiments 1-31.

[0573] Embodiment 33. A writing plasmid for use in a prokaryotic cell comprising:
[0574] (i) a nucleic acid sequence encoding a fusion protein comprising a nucleic acid programmable DNA binding protein (napDNAbp) and a nucleic acid editing domain operably linked to a first promoter;
[0575] (ii) a nucleic acid sequence encoding a sgRNA operably linked to a second promoter, wherein the sgRNA is complementary to a target sequence; and
[0576] (iii) an origin of replication,
   [0577] wherein at least one of the promoters is an inducible promoter, and wherein the sgRNA associates with the napDNAbp under conditions that induce the expression of the fusion protein and expression of the sgRNA.

[0578] Embodiment 34. The writing plasmid of embodiment 33, wherein the first promoter and the second promoter are different promoters.

[0579] Embodiment 35. The writing plasmid of embodiment 33 or 34, wherein the first promoter is a constitutive promoter.

[0580] Embodiment 36. The writing plasmid of embodiment 35, wherein the constitutive promoter is a constitutive Lac promoter.

[0581] Embodiment 37. The writing plasmid of embodiment 33 or 34, wherein the first promoter is an inducible promoter.

[0582] Embodiment 38. The writing plasmid of embodiment 37, wherein the inducible promoter is an anhydrotetracycline-inducible promoter, IPTG-inducible promoter, rhamnose-inducible promoter, or arabinose-inducible promoter.

[0583] Embodiment 39. The writing plasmid of embodiment 33, wherein the target nucleic acid sequence is present in a reporter gene.

[0584] Embodiment 40. The writing plasmid of embodiment 39, wherein the reporter gene encodes a fluorescent protein.

[0585] Embodiment 41. The writing plasmid of embodiment 40, wherein the fluorescent protein is an EGFP protein, or variant or fragment thereof.

[0586] Embodiment 42. The writing plasmid of embodiment 41, wherein the EGFP protein is a full-length EGFP protein.

[0587] Embodiment 43. The writing plasmid of embodiment 41, wherein the EGFP protein is a EGFP protein fragment.

[0588] Embodiment 44. The writing plasmid of embodiment 33 or 34, wherein the second promoter is a constitutive promoter.

[0589] Embodiment 45. The writing plasmid of embodiment 44, wherein the constitutive promoter is a constitutive Lac promoter.

[0590] Embodiment 46. The writing plasmid of embodiment 33 comprising: (i) a nucleic acid sequence encoding a fusion protein comprising a napDNAbp and a nucleic acid editing domain operably linked to an inducible promoter, (ii) a nucleic acid sequence encoding a sgRNA operably linked to a constitutive promoter, wherein the sgRNA is complementary to a target sequence, and (iii) an origin of replication, wherein the sgRNA is constitutively expressed, and wherein the sgRNA associates with the napDNAbp under conditions that induce the expression of the fusion protein.

[0591] Embodiment 47. The writing plasmid of embodiment 46, wherein the inducible promoter is an anhydrotetracycline-inducible promoter, and wherein the constitutive promoter is a constitutive Lac promoter.

[0592] Embodiment 48. The writing plasmid of embodiment 33 or 34, wherein the second promoter is an inducible promoter.

[0593] Embodiment 49. The writing plasmid of embodiment 48, wherein the second inducible promoter is an anhydrotetracycline-inducible promoter, an IPTG-inducible promoter, an arabinose-inducible promoter, a rhamnose-inducible promoter, a phage shock promoter (PSP), a light-inducible promoter, or a heat-inducible promoter.

[0594] Embodiment 50. The writing plasmid of embodiment 33 comprising: (i) a nucleic acid sequence encoding a fusion protein comprising a napDNAbp and a nucleic acid editing domain operably linked to a first inducible promoter, (ii) a nucleic acid sequence encoding a sgRNA operably linked to a second inducible promoter, wherein the sgRNA is complementary to a target sequence, and (iii) an origin of replication, wherein the sgRNA associates with the napDNAbp only under conditions that induce the expression of the fusion protein and expression of the sgRNA.

[0595] Embodiment 51. The writing plasmid of embodiment 50, wherein the first inducible promoter is an anhydrotetracycline-inducible promoter, and wherein the second inducible promoter is an IPTG-inducible promoter.

[0596] Embodiment 52. The writing plasmid of embodiment 50, wherein the first inducible promoter is an anhydrotetracycline-inducible promoter, and wherein the second inducible promoter is an arabinose-inducible promoter.

[0597] Embodiment 53. The writing plasmid of embodiment 50, wherein the first inducible promoter is an anhydrotetracycline-inducible promoter, and wherein the second inducible promoter is a rhamnose-inducible promoter.

[0598] Embodiment 54. The writing plasmid of embodiment 50, wherein the first inducible promoter is an anhydrotetracycline-inducible promoter, and wherein the second inducible promoter is a phage shock promoter.

[0599] Embodiment 55. The writing plasmid of embodiment 50, wherein the first inducible promoter is a light-inducible promoter, and wherein the second inducible promoter is an IPTG-inducible promoter.

[0600] Embodiment 56. The writing plasmid of any one of embodiments 33-55, wherein the writing plasmid further comprises (iv) a nucleic acid sequence encoding a second sgRNA operably linked to a third promoter, wherein the second sgRNA is complementary to a target sequence, and wherein the second sgRNA associates with the napDNAbp under conditions that induce the expression of the fusion protein and the second sgRNA.

[0601] Embodiment 57. The writing plasmid of embodiment 56, wherein the third promoter is a constitutive promoter.

[0602] Embodiment 58. The writing plasmid of embodiment 57, wherein the constitutive promoter is a constitutive Lac promoter.

[0603] Embodiment 59. The writing plasmid of embodiment 56, wherein the third promoter is an inducible promoter.

[0604] Embodiment 60. The writing plasmid of embodiment 59, wherein the inducible promoter is a rhamnose-inducible promoter, IPTG-inducible promoter, anhydrotetracycline-inducible promoter, or arabinose-inducible promoter.

[0605] Embodiment 61. The writing plasmid of embodiment 56 comprising: (i) a nucleic acid sequence encoding a fusion protein comprising a napDNAbp and a nucleic acid editing domain operably linked to a first inducible promoter, (ii) a nucleic acid sequence encoding a first sgRNA operably linked to a second inducible promoter, wherein the first sgRNA is complementary to a target sequence, (iii) a nucleic acid sequence encoding a second sgRNA operably linked to a third inducible promoter, wherein the second sgRNA is complementary to a target sequence, and (iv) an origin of replication,
[0606] wherein the first sgRNA associates with the napDNAbp only under conditions that induce the expression of the fusion protein and the expression of the first sgRNA, and wherein the second sgRNA associates with the napDNAbp only under conditions that induce the expression of the fusion protein and the expression of the second sgRNA.

[0607] Embodiment 62. The writing plasmid of embodiment 61, wherein the first inducible promoter is an anhydrotetracycline-inducible promoter, the second inducible promoter is an arabinose-inducible promoter, and the third inducible promoter is a rhamnose-inducible promoter.

[0608] Embodiment 63. The writing plasmid of any one of embodiments 33-62, wherein the writing plasmid further comprises (v) a nucleic acid sequence encoding a third sgRNA operably linked to a fourth promoter, wherein the third sgRNA is complementary to a target sequence, and wherein the third sgRNA associates with the napDNAbp under conditions that induce the expression of the fusion protein and expression of the third sgRNA.

[0609] Embodiment 64. The writing plasmid of embodiment 63, wherein the fourth promoter is a constitutive promoter.

[0610] Embodiment 65. The writing plasmid of embodiment 64, wherein the constitutive promoter is a constitutive Lac promoter.

[0611] Embodiment 66. The writing plasmid of embodiment 63, wherein the fourth promoter is an inducible promoter.

[0612] Embodiment 67. The writing plasmid of embodiment 66, wherein the inducible promoter is a rhamnose-inducible promoter, IPTG-inducible promoter, anhydrotetracycline-inducible promoter, or arabinose-inducible promoter.

[0613] Embodiment 68. The writing plasmid of embodiment 63 comprising: (i) a nucleic acid sequence encoding a fusion protein comprising a napDNAbp and a nucleic acid editing domain operably linked to a first inducible promoter, (ii) a nucleic acid sequence encoding a first sgRNA operably linked to a second inducible promoter, wherein the first sgRNA is complementary to a target sequence, (iii) a nucleic acid encoding a second sgRNA operably linked to a third inducible promoter, wherein the second sgRNA is complementary to a target sequence, (iv) a nucleic acid molecule encoding a third sgRNA operably linked to a fourth inducible promoter, wherein the third sgRNA is complementary to a target sequence, and (v) an origin of replication,
[0614] wherein the first sgRNA associates with the napDNAbp only under conditions that induce the expression of the fusion protein and the first sgRNA, and wherein the second sgRNA associates with the napDNAbp only under conditions that induce the expression of the fusion protein and the second sgRNA, and wherein the third sgRNA associates with the napDNAbp only under conditions that the expression of the fusion protein and the third sgRNA.

[0615] Embodiment 69. The writing plasmid of embodiment 68, wherein the first inducible promoter is an anhydrotetracycline-inducible promoter, the second inducible promoter is an IPTG-inducible promoter, the third inducible promoter is an arabinose-inducible promoter, and the fourth inducible promoter is a rhamnose-inducible promoter.

[0616] Embodiment 70. The writing plasmid of any one of embodiments 33-69, wherein the origin of replication comprises a origin of replication suitable for use in a bacterial cell.

[0617] Embodiment 71. The writing plasmid of embodiment 70, wherein the bacterial origin of replication comprises a pSC101, pMB1, pBR322, ColE1, p15A, or ChloDF13 origin of replication.

[0618] Embodiment 72. A bacterial cell comprising the writing plasmid of any one of embodiments 33-71.

[0619] Embodiment 73. A writing plasmid for use in a eukaryotic cell comprising:
[0620] (i) a nucleic acid sequence encoding a fusion protein comprising a nucleic acid programmable DNA binding protein (napDNAbp) and a nucleic acid editing domain operably linked to a first promoter; and
[0621] (ii) an origin of replication,
[0622] wherein the napDNAbp associates with an sgRNA under conditions that induce the expression of the fusion protein, and wherein the sgRNA is expressed by the eukaryotic cell.

[0623] Embodiment 74. The writing plasmid of embodiment 73, wherein the writing plasmid is used in combination with a second plasmid comprising (i) a nucleic acid sequence encoding a first sgRNA operably linked to a second promoter and (ii) an origin of replication.

[0624] Embodiment 75. The writing plasmid of embodiment 73 or 74, wherein the writing plasmid is used in combination with a third plasmid comprising (i) a nucleic acid sequence encoding a second sgRNA operably linked to a third promoter and (ii) an origin of replication.

[0625] Embodiment 76. The writing plasmid of any one of embodiments 73-75, wherein the writing plasmid is used in combination with a fourth plasmid comprising (i) a nucleic acid sequence encoding a third sgRNA operably linked to a fourth promoter and (ii) an origin of replication.

[0626] Embodiment 77. The writing plasmids of any one of embodiments 73-76, wherein the first, second, and third sgRNAs are each independently complementary to a different target sequence.

[0627] Embodiment 78. The writing plasmid of any one of embodiments 73-76, wherein the first, second, third, and/or fourth promoter is an inducible promoter.

[0628] Embodiment 79. The writing plasmid of any one of embodiments 73-76, wherein the first, second, third, and/or fourth promoter is a constitutive promoter.

[0629] Embodiment 80. The writing plasmid of embodiment 79, wherein the first promoter is a constitutive CMV promoter.

[0630] Embodiment 81. The writing plasmid of embodiment 58e, wherein the second, third, and fourth constitutive promoters are U6 promoters.

[0631] Embodiment 82. A writing plasmid for use in a eukaryotic cell comprising:
[0632] (i) a nucleic acid sequence encoding a fusion protein comprising a nucleic acid programmable DNA binding protein (napDNAbp) and a nucleic acid editing domain operably linked to a first promoter;
[0633] (ii) a nucleic acid sequence encoding a sgRNA operably linked to a second promoter, wherein the sgRNA is complementary to a target sequence; and
[0634] (iii) an origin of replication,
   [0635] wherein at least one of the promoters is an inducible promoter, and wherein the sgRNA associates with the napDNAbp under conditions that induce the expression of the fusion protein and expression of the sgRNA.

[0636] Embodiment 83. The writing plasmid of embodiment 82, wherein the first promoter is a constitutive promoter.

[0637] Embodiment 84. The writing plasmid of embodiment 83, wherein the constitutive promoter is a cytomegalovirus (CMV) promoter, a constitutive RNA polymerase III promoter, or a UBC promoter.

[0638] Embodiment 85. The writing plasmid of embodiment 82, wherein the first promoter is a promoter induced by a stimulus.

[0639] Embodiment 86. The writing plasmid of embodiment 85, wherein the stimulus is a small molecule, a protein, a peptide, an amino acid, a metabolite, an inorganic molecule, an organometallic molecule, an organic molecule, a drug or drug candidate, a sugar, a lipid, a metal, a nucleic acid, a molecule produced during the activation of an endogenous or an exogenous signaling cascade, light, heat, sound, pressure, mechanical stress, shear stress, or a virus or other microorganism, change in pH, or change in oxidation/reduction state.

[0640] Embodiment 87. The writing plasmid of embodiment 86, wherein the stimulus is forskolin.

[0641] Embodiment 88. The writing plasmid of embodiment 86, wherein the stimulus is lithium chloride (LiCl)

[0642] Embodiment 89. The writing plasmid of embodiment 86, wherein the stimulus is phorbol 12-myristate 13-acetate (PMA).

[0643] Embodiment 90. The writing plasmid of embodiment 86, wherein the stimulus is dexamethasone.

[0644] Embodiment 91. The writing plasmid of embodiment 86, wherein the stimulus is all-trans retinoic acid (ATRA).

[0645] Embodiment 92. The writing plasmid of embodiment 86, wherein the stimulus is calcitriol.

[0646] Embodiment 93. The writing plasmid of embodiment 86, wherein the stimulus is sulforaphane.

[0647] Embodiment 94. The writing plasmid of embodiment 86, wherein the stimulus is 2,3,7,8-Tetrachlorodibenzodioxin (TCDD).

[0648] Embodiment 95. The writing plasmid of embodiment 86, wherein the stimulus is an antibiotic.

[0649] Embodiment 96. The writing plasmid of embodiment 86 or 87, wherein the stimulus is doxycycline.

[0650] Embodiment 97. The writing plasmid of embodiment 86 or 87, wherein the stimulus is tanespimycin.

[0651] Embodiment 98. The writing plasmid of embodiment 86 or 87, wherein the stimulus is tunicamycin.

[0652] Embodiment 99. The writing plasmid of embodiments 85, wherein the promoter is a tetracycline-inducible promoter.

[0653] Embodiment 100. The writing plasmid of embodiment 85 or 86, wherein the inducible promoter is induced by a signaling molecule produced during an activated endogenous or exogenous cell signaling cascade.

[0654] Embodiment 101. The writing plasmid of embodiment 100, wherein the inducible promoter is induced by a signaling molecule produced during an activated NF-κB, SMADs, Signal Transducer and Activator of Transcription 1 (STAT1), STAT2, STAT3, interferon regulatory factor-1 (IRF-1), E2F, cAMP Response Element-Binding protein (CREB), CCAAT-Enhancer-Binding protein (C/EBP), Serum Response Factor (SRF), Nuclear Factor of Activated T-cells (NFAT), Glucocorticoid Receptor (GR), Mitogen Activated Protein Kinase/c-Jun N-terminal Kinase (MAPK/JNK), GATA transcription factor (GATA), Retinoic Acid Receptor (RAR), Retinoid X Receptor (RXR), Vitamin D Receptor (VDR), Adenylate-Uridylate element (ARE), Xenobiotic/Dioxin-Responsive Element (XRE/DRE), Heat Shock Factor (HSF), Activating Transcription Factor 6 (ATF6), or a CCAAT-binding Factor/Nuclear Transcription Factor Y/Transcriptional Factor Yin Yang 1 (CBF/NF-Y/YY1) signaling cascade.

[0655] Embodiment 102. The writing plasmid of claim 100, wherein the signaling molecule is Tumor Necrosis Factor (TNF), Transforming Growth Factor β (TGF-β), Interleukin 6 (IL-6), Interferon α (IFNβ), IFNγ, Epidermal Growth Factor (EGF).

[0656] Embodiment 103. The writing plasmid of embodiment 100, wherein the inducible promoter is induced by a signaling molecule produced during an activated Wnt signaling cascade.

[0657] Embodiment 104. The writing plasmid of embodiment 103, wherein the signaling molecule produced during the activated Wnt signaling cascade is beta-catenin.

[0658] Embodiment 105. The writing plasmid of embodiment 73 or 82, wherein the target sequence is present in a safe harbor locus.

[0659] Embodiment 106. The writing plasmid of embodiment 105, wherein the safe harbor locus is present in a CCR5 gene locus.

[0660] Embodiment 107. The writing plasmid of embodiment 73 or 82, wherein the second promoter is a constitutive promoter.

[0661] Embodiment 108. The writing plasmid of embodiment 107, wherein the second promoter is a cytomegalovirus (CMV) promoter, a constitutive RNA polymerase III promoter, or a UBC promoter.

[0662] Embodiment 109. The writing plasmid of embodiment 73 or 82, wherein the second promoter is an inducible promoter.

[0663] Embodiment 110. The writing plasmid of embodiment 109, wherein the second promoter is an inducible RNA polymerase III promoter.

[0664] Embodiment 111. The writing plasmid of embodiment 109 or 110, wherein the inducible promoter is an IPTG-inducible RNA polymerase III promoter or a tetracycline-inducible RNA polymerase III promoter.

[0665] Embodiment 112. The writing plasmid of embodiment 108 or 110, wherein the RNA polymerase III promoter is a U6 promoter.

[0666] Embodiment 113. The writing plasmid of embodiment 108 or 110, wherein the RNA polymerase III promoter is a H1 promoter.

[0667] Embodiment 114. The writing plasmid of embodiment 82 comprising: (i) a nucleic acid sequence encoding a fusion protein comprising a napDNAbp and a nucleic acid editing domain operably linked to an inducible promoter, (ii) a nucleic acid encoding a sgRNA operably liked to a constitutive promoter, wherein the sgRNA is complementary to a target sequence, and (iii) an origin of replication,
[0668] wherein the sgRNA is constitutively expressed, and wherein the sgRNA associates with the napDNAbp under conditions that induce the expression of the fusion protein.

[0669] Embodiment 115. The writing plasmid of embodiment 114, wherein the inducible promoter is a tetracycline-inducible promoter, and wherein the constitutive promoter is a constitutive RNA polymerase III U6 promoter.

[0670] Embodiment 116. The writing plasmid of embodiment 114, wherein the inducible promoter is induced by a signaling molecule produced during an activated Wnt signaling cascade, and wherein the constitutive promoter is a constitutive U6 promoter.

[0671] Embodiment 117. The writing plasmid of any one of embodiments 82-116, wherein the nucleic acid sequence of (i) or (ii) further comprises a nucleic acid sequence encoding a reporter protein.

[0672] Embodiment 118. The writing plasmid of embodiment 117, wherein the nucleic acid sequence encoding the reporter protein is connected to the 3′ end of the nucleic acid sequence of (i) by an intervening P2A sequence.

[0673] Embodiment 119. The writing plasmid of embodiment 117 or 118, wherein the reporter protein is a luciferase protein.

[0674] Embodiment 120. The writing plasmid of any one of embodiments 82-119, wherein the writing plasmid is used in combination with (i) a second plasmid comprising a nucleic acid sequence encoding a sgRNA operably linked to a constitutive promoter comprising a repressor binding site, wherein the sgRNA is complementary to a target sequence; and (ii) a third plasmid comprising a nucleic acid sequence encoding one or more repressor proteins operably linked to a second constitutive promoter,
[0675] wherein the repressor protein and the sgRNA are constitutively expressed, and wherein the repressor protein binds to the repressor binding site of the first constitutive promoter.

[0676] Embodiment 121. The writing plasmid of embodiment 120, wherein the nucleic acid sequence of (ii) encodes one repressor protein.

[0677] Embodiment 122. The writing plasmid of embodiment 121, wherein the repressor protein is a tetracycline repressor protein (TetR) or a lactose repressor protein (LacI).

[0678] Embodiment 123. The writing plasmid of embodiment 120, wherein the nucleic acid sequence of (ii) encodes a first repressor protein and a second repressor protein, and wherein an intervening P2A sequence separates the nucleic acid sequences encoding the first and second repressor proteins.

[0679] Embodiment 124. The writing plasmid of embodiment 123, wherein the first repressor protein is a tetracycline repressor protein (TetR) or a lactose repressor protein (LacI) and the second repressor protein is a tetracycline repressor protein (TetR) or a lactose repressor protein (LacI), wherein the first repressor protein and the second repressor protein are not the same.

[0680] Embodiment 125. The writing plasmid of embodiment 124, wherein the Lac repressor protein cannot bind to the repressor binding site in the presence of IPTG.

[0681] Embodiment 126. The writing plasmid of embodiment 124, wherein the tetracycline repressor protein cannot bind to the repressor binding site in the presence of a tetracycline molecule.

[0682] Embodiment 127. The writing plasmid of embodiment 126, wherein the tetracycline molecule is doxycycline.

[0683] Embodiment 128. The writing plasmid of any one of embodiments 120-127, wherein the writing plasmid is used with a fourth plasmid comprising a nucleic acid encoding a second sgRNA operably linked to a third constitutive promoter comprising a second repressor binding site, wherein the second sgRNA is complementary to a target sequence, and
[0684] wherein the second repressor protein and the second sgRNA are constitutively expressed, and wherein the second repressor protein binds to the second repressor binding site of the third constitutive promoter.

[0685] Embodiment 129. The writing plasmid of embodiment 128, wherein the first, second, and/or third constitutive promoter is a CMV promoter, a U6 promoter, a H1 promoter, or a UBC promoter.

[0686] Embodiment 130. The writing plasmid of any one of embodiments 120-128, wherein the first, the second, and/or the third constitutive promoters are different constitutive promoters.

[0687] Embodiment 131. The writing plasmid of embodiment 108, wherein the first constitutive promoter is a U6 promoter comprising a Lac repressor protein binding site, the second constitutive promoter is a UBC promoter, and the third constitutive promoter is a H1 promoter comprising a tetracycline repressor protein binding site.

[0688] Embodiment 132. The writing plasmid of any one of embodiments 73-131, wherein the origin of replication is a origin of replication suitable for use in a eukaryotic cell.

[0689] Embodiment 133. The writing plasmid of embodiment 132, wherein the origin of replication is a ChloE1 origin of replication.

[0690] Embodiment 134. The writing plasmid of any one of embodiments 73-133, wherein the sgRNA is expressed in a cell but is not encoded by the writing plasmid.

[0691] Embodiment 135. A eukaryotic cell comprising the writing plasmid of any of embodiments 73-134.

[0692] Embodiment 136. The writing plasmid of any one of embodiments 33-134, wherein the napDNAbp comprises a Cas9 domain, a Cpf1, a CasX, a CasY, a C2c1, a C2c2, or a C2c3.

[0693] Embodiment 137. The writing plasmid of embodiment 136, wherein the Cas9 domain is a nuclease inactive Cas9 (dCas9) domain, a Cas9 nickase (Cas9n) domain, or a nuclease active Cas9 domain.

[0694] Embodiment 138. The writing plasmid of embodiment 136 or 137, wherein the Cas9 domain is a Cas9 domain from Streptococcus pyogenes (spCas9).

[0695] Embodiment 139. The writing plasmid of any one of embodiments 136-138, wherein the Cas9 domain is a dCas9 domain that comprises a D10A and a H840A mutation in the amino acid sequence provided by SEQ ID NO: 10, or a corresponding mutation in any of the amino acid sequences provided in SEQ ID NOs: 11-260.

[0696] Embodiment 140. The writing plasmid of any one of embodiments 136-138, wherein the Cas9 domain is a Cas9n domain that comprises a D10A or a H840A mutation in the amino acid sequence provided by SEQ ID NO: 10, or a corresponding mutation in any of the amino acid sequences provided in SEQ ID NOs: 11-260.

[0697] Embodiment 141. The writing plasmid of any one of embodiments 136-138, wherein the Cas9 domain comprises the amino acid sequence of SEQ ID NO: 6.

[0698] Embodiment 142. The writing plasmid of any one of embodiments 136-138, wherein the Cas9 domain comprises the amino acid sequence of SEQ ID NO: 7.

[0699] Embodiment 143. The writing plasmid of any one of embodiments 33-134, wherein the nucleic acid editing domain comprises a deaminase, a nuclease, a nickase, a recombinase, a methyltransferase, a methylase, an acetylase, an acetyltransferase, a transcriptional activator, or a transcriptional repressor domain.

[0700] Embodiment 144. The writing plasmid of embodiment 143, wherein the nucleic acid editing domain comprises a deaminase domain.

[0701] Embodiment 145. The writing plasmid of embodiment 144, wherein the deaminase domain is a cytidine deaminase domain.

[0702] Embodiment 146. The writing plasmid of embodiment 145, wherein the cytidine deaminase domain is a deaminase domain from the apoplipoprotein B mRNA-editing complex (APOBEC) family.

[0703] Embodiment 147. The writing plasmid of embodiment 146, wherein the APOBEC family deaminase is selected from the group consisting of APOBEC1 deaminase, APOBEC2 deaminase, APOBEC3A deaminase, APOBEC3B deaminase, APOBEC3C deaminase, APOBEC3D deaminase, APOBEC3F deaminase, APOBEC3G deaminase, and APOBEC3H deaminase.

[0704] Embodiment 148. The writing plasmid of any one of embodiments 33-134, wherein the fusion protein comprises a Cas9 domain and a cytidine deaminase domain, wherein the Cas9 domain and the cytidine deaminase domain are linked via a linker.

[0705] Embodiment 149. The writing plasmid of embodiment 148, wherein the linker comprises the amino acid sequence SGSETPGTSESATPES (SEQ ID NO: 306).

[0706] Embodiment 150. The writing plasmid of any one of embodiments 148-149, wherein the fusion protein comprises the amino acid sequence of any one of SEQ ID NOs: 540-542.

[0707] Embodiment 151. The writing plasmid of any one of embodiments 33-134, wherein the fusion protein comprises one or more deaminase domains.

[0708] Embodiment 152. The writing plasmid of embodiment 151, wherein the fusion protein comprises two deaminase domains.

[0709] Embodiment 153. The writing plasmid embodiment 151 or 152, wherein one or more of the deaminase domains is an adenosine deaminase domain.

[0710] Embodiment 154. The writing plasmid of embodiment 153, wherein the adenosine deaminase domain comprises an ecTadA domain, or variant thereof.

[0711] Embodiment 155. The writing plasmid of embodiment 154, wherein the ecTadA domain comprises the amino acid sequence of any one of SEQ ID NOs: 400-480.

[0712] Embodiment 156. The writing plasmid of any one of embodiments 151-155, wherein the fusion protein comprises a Cas domain and one or more adenosine deaminase domains, wherein the Cas domain and one or more of the adenosine deaminase domains are linked via a linker.

[0713] Embodiment 157. The writing plasmid of embodiment 156, wherein the linker comprises the amino acid sequence of any one of SEQ ID NOs: 300-318.

[0714] Embodiment 158. The writing plasmid of any one of embodiments 148-157, wherein the fusion protein further comprises a uracil glycosylase inhibitor (UGI) domain.

[0715] Embodiment 159. The writing plasmid of embodiment 158, wherein the fusion protein comprises the amino acid sequence of any one of SEQ ID NOs: 543-550.

[0716] Embodiment 160. The writing plasmid of embodiment 159, wherein the fusion protein comprises the amino acid sequence of SEQ ID NO: 543.

[0717] Embodiment 161. The writing plasmid of embodiment 159, wherein the fusion protein comprises the amino acid sequence of SEQ ID NO: 544.

[0718] Embodiment 162. The writing plasmid of any one of embodiments 151-158, wherein the fusion protein comprises the amino acid sequence of SEQ ID NO: 560-586.

[0719] Embodiment 163. A recording plasmid comprising (i) a target sequence complementary to a sgRNA, and (ii) an origin or replication.

[0720] Embodiment 164. The recording plasmid of embodiment 163, wherein the sgRNA is expressed in a cell.

[0721] Embodiment 165. The recording plasmid of embodiment 163, wherein the sgRNA is not encoded by a writing plasmid.

[0722] Embodiment 166. The recording plasmid of embodiment 163, wherein the sgRNA is encoded by a plasmid separate from the writing plasmid.

[0723] Embodiment 167. The recording plasmid of embodiment 163, wherein target sequence is present in a reporter gene.

[0724] Embodiment 168. The recording plasmid of embodiment 167, wherein the reporter gene is an EGFP gene.

[0725] Embodiment 169. The recording plasmid of embodiment 168, wherein the EGFP gene comprises a nucleic acid sequence that encodes an EGFP protein, or variant thereof.

[0726] Embodiment 170. The recording plasmid of embodiment 169, wherein the EGFP protein, or variant thereof, comprises an amino acid sequence that is at least about 90% identical to the amino acid sequence of SEQ ID NO: 600.

[0727] Embodiment 170. The recording plasmid of embodiment 169, wherein the EGFP protein is a wild-type EGFP protein, and wherein the wild-type EGFP protein produces fluorescence.

[0728] Embodiment 171. The recording plasmid of embodiment 170, wherein the wild-type EGFP protein comprises the amino acid sequence of SEQ ID NO: 660.

[0729] Embodiment 172. The recording plasmid of embodiment 169, wherein the EGFP protein is a truncated EGFP protein, and wherein the truncated EGFP protein does not fluoresce.

[0730] Embodiment 173. The recording plasmid of embodiment 169, wherein the EGFP protein comprises a an amino acid sequence comprising one or more amino acid insertions, deletions, or mutations relative to the amino acid sequence of SEQ ID NO: 600.

[0731] Embodiment 174. The recording plasmid of any one of embodiments 163, wherein the recording plasmid further comprises one or more nucleic acid sequences, wherein each nucleic acid sequence encodes an antibiotic resistance protein, or variant thereof.

[0732] Embodiment 175. The recording plasmid of embodiment 174, wherein the antibiotic resistance protein is chloramphenicol acetyletransferase (Cat), and wherein the Cat protein confers chloramphenicol resistance.

[0733] Embodiment 176. The recording plasmid of embodiment 175, wherein the Cat protein comprises the amino acid sequence of SEQ ID NO: 665.

[0734] Embodiment 177. The recording plasmid of embodiment 174, wherein the antibiotic resistance protein is aminoglycoside-3′-phosphotransferase (Aph3′), and wherein the Aph3′ protein confers kanamycin resistance.

[0735] Embodiment 178. The recording plasmid of embodiment 177, wherein the Aph3′protein comprises the amino acid sequence of SEQ ID NO: 666.

[0736] Embodiment 179. The recording plasmid of any one of embodiments 174-175, wherein the antibiotic resistance protein is a variant comprising one or more mutations that inactivate the antibiotic resistance protein.

[0737] Embodiment 180. The recording plasmid of embodiment 179, wherein the variant is a Cat variant comprising a H195A mutation in the amino acid sequence provided by SEQ ID NO: 665, and wherein the H195A mutation results in a Cat protein that does not confer chloramphenicol resistance.

[0738] Embodiment 181. The recording plasmid of embodiment 179, wherein the variant is a Aph3′ protein comprising a D208A mutation in the amino acid sequence provided by SEQ ID NO: 666, and wherein the D208A mutation results in a Aph3′ protein that does not confer kanamycin resistance.

[0739] Embodiment 182. The recording plasmid of any one of embodiments 174-181, wherein the recording plasmid comprises a nucleic acid sequence encoding a Cat protein, or variant thereof, and a nucleic acid sequence encoding a Aph3′ protein, or variant thereof.

[0740] Embodiment 183. The recording plasmid of embodiment 182, wherein the recording plasmid comprises (a) a nucleic acid sequence encoding a Cat variant comprising a H195A mutation in the amino acid sequence provided by SEQ ID NO: 665, wherein the H195A mutation results in a Cat protein that does not confer chloramphenicol resistance, and (b) a nucleic acid sequence encoding aminoglycoside-3′-phosphotransferase (Aph3′), wherein the Aph3′ protein confers kanamycin resistance.

[0741] Embodiment 184. The recording plasmid of embodiment 182, wherein the recording plasmid comprises (a) a nucleic acid sequence encoding chloramphenicol acetyletransferase (Cat), and wherein the Cat protein confers chloramphenicol resistance, and (b) a nucleic acid sequence encoding a Aph3′ protein comprising a D208A mutation in the amino acid sequence provided by SEQ ID NO: 666, and wherein the D208A mutation results in a Aph3′ protein that does not confer kanamycin resistance.

[0742] Embodiment 185. The recording plasmid of any one of embodiments 163-184, wherein the origin of replication is an origin of replication suitable for use in a bacterial cell.

[0743] Embodiment 186. The recording plasmid of embodiment 185, wherein the origin of replication is a pUC origin of replication.

[0744] Embodiment 187. The recording plasmid of embodiment 185, wherein the origin of replication is a RSF1030 origin of replication.

[0745] Embodiment 188. A cell data recorder system for use in a prokaryotic cell comprising:
[0746] (a) the writing plasmid of any one of embodiments 1-31;
[0747] (b) a first recording plasmid selected from the recording plasmids of any one of embodiments 163-186; and
[0748] (c) a second recording plasmid selected from the recording plasmids of any one of embodiments 163-186,
[0749] and wherein the first recording plasmid and the second recording plasmid are not the same.

[0750] Embodiment 189. The cell data recorder system of embodiment 188, wherein the first recording plasmid is the recording plasmid of embodiment 171.

[0751] Embodiment 190. The cell data recorder system of embodiment 188, wherein the second recording plasmid is the recording plasmid of embodiment 172.

[0752] Embodiment 191. The cell data recorder system of embodiment 188, wherein the first recording plasmid is the recording plasmid of embodiment 183.

[0753] Embodiment 192. The cell data recorder system of embodiment 188, wherein the second recording plasmid is the recording plasmid of embodiment 184.

[0754] Embodiment 193. A cell data recorder system for use in a prokaryotic cell comprising:
[0755] (i) the writing plasmid of any one of embodiments 33-71; and
[0756] (ii) one or more recording plasmids selected from the recording plasmids of any one of embodiments 163-186.

[0757] Embodiment 194. The cell data recorder system of embodiment 193, wherein the system comprises one recording plasmid.

[0758] Embodiment 195. The cell data recorder system of embodiment 194, wherein the recording plasmid is the recording plasmid of embodiment 171.

[0759] Embodiment 196. The cell data recorder system of embodiment 194, wherein the recording plasmid is the recording plasmid of embodiment 173.

[0760] Embodiment 197. The cell data recorder system of embodiment 194, wherein the recording plasmid is the recording plasmid of embodiment 187.

[0761] Embodiment 198. A cell data recorder system for use in eukaryotic cells comprising:
[0762] (i) the writing plasmid of any one of embodiments 73-114; and
[0763] (ii) one or more recording loci,
[0764] wherein each of the one or more recording loci comprises a target sequence complementary to an sgRNA expressed in the cell.

[0765] Embodiment 199. The cell data recorder system of embodiment 198, wherein the sgRNA is encoded by a plasmid.

[0766] Embodiment 200. The cell data recorder system of embodiment 198 or 199, wherein the sgRNA is encoded by the writing plasmid, and wherein the nucleic acid sequence encoding the sgRNA is operably linked to a promoter.

[0767] Embodiment 201. The cell data recorder system of embodiment 198, wherein the target sequence is present in a safe harbor locus.

[0768] Embodiment 202. The cell data recorder system of embodiment 201, wherein the safe harbor locus is located in the CCR5 gene.

[0769] Embodiment 203. A kit for use in a prokaryotic cell comprising the cell data recorder system of any one of embodiments 188-197.

[0770] Embodiment 204. A kit for use in a eukaryotic cell comprising the cell data recorder system of any one of embodiments 198-202.

[0771] Embodiment 205. A prokaryotic cell comprising the cell data recorder system of any one of embodiments 188-197.

[0772] Embodiment 206. The cell of embodiment 203 or 205, wherein the prokaryotic cell is a bacterial cell.

[0773] Embodiment 207. The cell of embodiment 206, wherein the bacterial cell is an E. coli cell.

[0774] Embodiment 208. A eukaryotic cell comprising the cell data recorder system of any one of embodiments 198-202.

[0775] Embodiment 209. The cell of embodiment 204 or 208, wherein the eukaryotic cell is a mammalian cell.

[0776] Embodiment 210. The cell of embodiment 209, wherein the mammalian cell is a human cell.

[0777] Embodiment 211. A method for engineering a cell, the method comprising:
[0778] contacting the cell with the cell data recorder system of any one of embodiments 188-Embodiment 192.

[0779] Embodiment 212. The method of embodiment 211, wherein the writing plasmid, the first recording plasmid, and/or the second recording plasmid are transfected into the cell.

[0780] Embodiment 213. The method of embodiment 211, wherein the writing plasmid is transfected into the cell.

[0781] Embodiment 214. The method of embodiment 211, wherein the first recording plasmid is transfected into the cell.

[0782] Embodiment 215. The method of embodiment 211, wherein the second recording plasmid is transfected into the cell.

[0783] Embodiment 216. The method of any one of embodiments 211-215, wherein the writing plasmid, the first recording plasmid, and/or the second recording plasmid is transfected into the cell via electroporation.

[0784] Embodiment 217. The method of any one of embodiments 211-215, wherein the writing plasmid, the first recording plasmid, and/or the second recording plasmid is transfected into the cell via heat shock.

[0785] Embodiment 218. The method of any one of embodiments 211-215, wherein the writing plasmid, the first recording plasmid, and/or the second recording plasmid is transfected into the cell via a composition comprising a cationic lipid reagent.

[0786] Embodiment 219. The method of any one of embodiments 211-218, wherein from 50 ng to 150 ng of the writing plasmid is used in a transfection reaction for transfecting the cell.

[0787] Embodiment 220. The method of any one of embodiments 211-218, wherein from 400 ng to 600 ng of the first recording plasmid is used in a transfection reaction for transfecting the cell.

[0788] Embodiment 221. The method of any one of embodiments 211-218, wherein from 400 ng to 600 ng of the second recording plasmid is used in a transfection reaction for transfecting the cell.

[0789] Embodiment 222. The method of any one of embodiments 211-221, wherein the cell is a prokaryotic cell.

[0790] Embodiment 223. The method of embodiment 222, wherein the prokaryotic cell is a bacterial cell.

[0791] Embodiment 224. The method of any one of embodiments 223, wherein the bacterial cell is an Escherichia coli (E. coli) cell.

[0792] Embodiment 225. The method of embodiment 224, wherein the E. coli cell is an E. coli S1030 cell.

[0793] Embodiment 226. A method for engineering a cell, the method comprising:
[0794] contacting the cell with the cell data recorder system of any one of embodiments 193-197.

[0795] Embodiment 227. The method of embodiment 226, wherein the writing plasmid, and/or the one or more recording plasmids are transfected into the cell.

[0796] Embodiment 228. The method of embodiment 226 or 227, wherein the writing plasmid is transfected into the cell.

[0797] Embodiment 229. The method of embodiment 226 or 227, wherein the one or more recording plasmids are transfected into the cell.

[0798] Embodiment 230. The method of any one of embodiments 226-229, wherein the writing plasmid and/or the one or more recording plasmids are transfected into the cell via electroporation.

[0799] Embodiment 231. The method of any one of embodiments 226-229, wherein the writing plasmid and/or the one or more recording plasmids are transfected into the cell via heat shock.

[0800] Embodiment 232. The method of any one of embodiments 226-229, wherein the writing plasmid and/or the one or more recording plasmids are transfected into the cell via a cationic lipid reagent.

[0801] Embodiment 233. The method of any one of embodiments 226-232, wherein from 50 ng to 150 ng of the writing plasmid is used in a transfection reaction for transfecting the cell.

[0802] Embodiment 234. The method of any one of embodiments 226-232, wherein from 400 ng to 600 ng of the one or more recording plasmids are used in a transfection reaction for transfecting the cell.

[0803] Embodiment 235. The method of any one of embodiments 226-234, wherein the cell is a prokaryotic cell.

[0804] Embodiment 236. The method of embodiment 235, wherein the prokarytoic cell is a bacterial cell.

[0805] Embodiment 237. The method of embodiment 236, wherein the bacterial cell is an Escherichia coli (E. coli) cell.

[0806] Embodiment 238. The method of embodiment 237, wherein the E. coli cell is an E. coli S1030 cell or an E. coli S2063 cell.

[0807] Embodiment 239. A method for engineering a cell, the method comprising:
[0808] contacting the cell with the cell data recorder system of any one of embodiments 198-202.

[0809] Embodiment 240. The method of embodiment 239, wherein the writing plasmid and/or a plasmid encoding the sgRNA complementary to the target sequence are transfected into the cell.

[0810] Embodiment 241. The method of embodiment 239 or 240, wherein the writing plasmid is transfected into the cell.

[0811] Embodiment 242. The method of embodiment 239 or 240, wherein the plasmid expressing the sgRNA complementary to the target sequence is transfected into the cell.

[0812] Embodiment 243. The method of any one of embodiments 239-242, wherein the sgRNA complementary to the target sequence is encoded by a plasmid different from the writing plasmid.

[0813] Embodiment 244. The method of any one of embodiments 239-242, wherein the sgRNA complementary to the target sequence is encoded by the writing plasmid.

[0814] Embodiment 245. The method of any one of embodiments 239-244, wherein the writing plasmid and/or the plasmid encoding the sgRNA are transfected into the cell via electroporation.

[0815] Embodiment 246. The method of any one of embodiments 239-244, wherein the writing plasmid and/or the plasmid encoding the sgRNA are transfected into the cell via heat shock.

[0816] Embodiment 247. The method of any one of embodiments 239-244, wherein the writing plasmid and/or the plasmid encoding the sgRNA are transfected into the cell via a cationic lipid reagent.

[0817] Embodiment 248. The method of embodiment 247, wherein the cationic lipid reagent is Lipofectamine® 2000.

[0818] Embodiment 249. The method of any one of embodiments 239-248, wherein from 700 ng to 900 ng of the writing plasmid is used in a transfection reaction for transfecting the cell.

[0819] Embodiment 250. The method of any one of embodiments 239-248, wherein from 10 ng to 60 ng of the plasmid encoding the sgRNA is used in a transfection reaction for transfecting the cell.

[0820] Embodiment 251. The method of any one of embodiments 239-250, wherein the cell is a eukaryotic cell.

[0821] Embodiment 252. The method of embodiment 251, wherein the eukaryotic cell is a mammalian cell.

[0822] Embodiment 253. The method of embodiment 252, wherein the mammalian cell is a human cell.

[0823] Embodiment 254. The method of any one of embodiments 253, wherein the human cell is a HEK293T cell.

[0824] Embodiment 255. The method of embodiment 240-244, wherein the target sequence is present in a safe harbor locus.

[0825] Embodiment 256. The method of any one of embodiments 255, wherein the target sequence is present in a safe harbor locus in the CCR5 gene.

[0826] Embodiment 257. A method for recording the presence and/or duration of a stimulus in an engineered cell, the method comprising:
[0827] (i) providing an engineered cell comprising the cell data recorder system of any one of embodiments 188-192; and
[0828] (ii) determining an amount of the first recording plasmid (R1) and an amount of the second recording plasmid (R2) in the engineered cell.

[0829] Embodiment 258. The method of embodiment 257, wherein the engineered cell is produced by the method of any one of embodiments 211-225.

[0830] Embodiment 259. The method of embodiment 257 or 258, wherein the napDNAbp of the cell data recorder system is associated with a sgRNA complementary to the target sequence of R1, and wherein the sgRNA is not complementary to the target sequence of R2.

[0831] Embodiment 260. The method of embodiment 259, wherein the sgRNA is encoded by the writing plasmid, and wherein the nucleic acid sequence encoding the sgRNA is operably linked to a promoter.

[0832] Embodiment 261. The method of embodiment 259, wherein the napDNAbp is a nuclease active Cas9 domain.

[0833] Embodiment 262. The method of embodiment 259, wherein the target sequence of R1 is present in a reporter gene encoding a functional reporter protein.

[0834] Embodiment 263. The method of embodiment 262, wherein the functional reporter protein is a fluorescent protein.

[0835] Embodiment 264. The method of embodiment 263, wherein the fluorescent protein is EGFP.

[0836] Embodiment 265. The method of embodiment 259, wherein the target sequence of R2 is present in a reporter gene encoding a non-functional reporter protein.

[0837] Embodiment 266. The method of embodiment 265, wherein the non-functional reporter protein does not fluoresce.

[0838] Embodiment 267. The method of embodiment 257 or 258, wherein the amount of the first recording plasmid (R1), and/or the amount of the second recording plasmid (R2) is determined using high-throughput sequencing of the amplified target sequence of R1 and/or R2.

[0839] Embodiment 268. The method of embodiment 257 or 258, wherein the amount of the first recording plasmid (R1) is determined using high-throughput sequencing of the amplified target sequence of R1.

[0840] Embodiment 269. The method of embodiment 257 or 258, wherein the amount of the second recording plasmid (R2) is determined using high-throughput sequencing of the amplified target sequence of R2.

[0841] Embodiment 270. The method of embodiment 257 or 258, wherein the amount of the first recording plasmid (R1), and/or the second recording plasmid (R2) is determined by measuring a level of fluorescence from the cell.

[0842] Embodiment 271. The method of embodiment 270, wherein the level of fluorescence from the cell corresponds to the amount of functional reporter protein expressed in the cell.

[0843] Embodiment 272. The method of any one of embodiments 257-271, wherein the cell is not contacted with a stimulus.

[0844] Embodiment 273. The method of any one of embodiments 257-271, wherein further comprising contacting the cell with a stimulus, wherein the stimulus induces the expression of the napDNAbp and/or the sgRNA encoded by the writing plasmid.

[0845] Embodiment 274. The method of embodiment 273, wherein the stimulus is a small molecule, a protein, a peptide, an amino acid, a metabolite, an inorganic molecule, an organometallic molecule, an organic molecule, a drug or drug candidate, a sugar, a lipid, a metal, a nucleic acid, a molecule produced during the activation of an endogenous or an exogenous signaling cascade, light, heat, sound, pressure, mechanical stress, shear stress, or a virus or other microorganism, change in pH, or change in oxidation/reduction state.

[0846] Embodiment 275. The method of any one of embodiments 273-274, wherein the cell is contacted with the stimulus at least once.

[0847] Embodiment 276. The method of embodiment 275, wherein the napDNAbp introduces a DNA double-strand break in the target sequence of R1, thereby reducing the amount of R1.

[0848] Embodiment 277. The method of embodiment 275, wherein the napDNAbp introduces a DNA double-strand break in the target sequence of R1, thereby reducing the amount of functional reporter protein expressed in the cell.

[0849] Embodiment 278. The method of any one of embodiments 273-277, wherein the cell is contacted with the stimulus at least two, three, four, five, six, seven, eight, nine, or ten times.

[0850] Embodiment 279. The method of any one of embodiments 257-278, wherein the determining of (ii) is performed one, two, three, four, five, six, seven, eight, nine, or ten times.

[0851] Embodiment 280. The method of any one of embodiments 257-279, further comprising (iii) determining a ratio of the amount of the first recording plasmid (R1) and the amount of the second recording plasmid (R2).

[0852] Embodiment 281. The method of embodiment 280, wherein the ratio of R1 to R2 is determined when the cell is not contacted with the stimulus.

[0853] Embodiment 282. The method of embodiment 280, wherein the ratio is determined when the cell is contacted with the stimulus.

[0854] Embodiment 283. The method of embodiment 282, wherein the cell is contacted with the stimulus at least once.

[0855] Embodiment 284. The method of embodiment 282 or 283, wherein the cell is contacted with the stimulus at least two, three, four, five, six, seven, eight, nine, or ten times.

[0856] Embodiment 285. The method of any one of embodiments 280-284, wherein the determining of (iii) is performed one, two, three, four, five, six, seven, eight, nine, or ten times.

[0857] Embodiment 286. The method of any one of embodiments 280-284, further comprising (iv) comparing the ratio of R1 to R2 in the presence of the stimulus to the ratio of R1 to R2 in the absence of the stimulus.

[0858] Embodiment 287. The method of embodiment 286, wherein the ratio of R1 to R2 does not significantly change in the absence of the stimulus.

[0859] Embodiment 288. The method of embodiment 286, wherein a change in the ratio of R1 to R2 indicates the presence of the stimulus.

[0860] Embodiment 289. The method of embodiment 288, wherein the ratio of R1 to R2 decreases in the presence of the stimulus.

[0861] Embodiment 290. The method of embodiment 289, wherein the ratio of R1 to R2 decreases by at least 1%, 5%, 10%, 15%, 20%, 25%, 30%, 35%, 40%, 45%, 50%, 55%, or 65% in the presence of the stimulus.

[0862] Embodiment 291. The method of embodiment 289, wherein the ratio of R1 to R2 decreases by at least 2-fold, 3-fold, 4-fold, or 5-fold in the presence of the stimulus.

[0863] Embodiment 292. The method of any one of embodiments 286-291, wherein the comparing of (iv) is performed one, two, three, four, five, six, seven, eight, nine, or ten times.

[0864] Embodiment 293. The method of any one of embodiments 286-292 further comprising (iv) resetting the amount of the first recording plasmid (R1) and the amount of the second recording plasmid (R2) in the engineered cell.

[0865] Embodiment 294. The method of embodiment 293, wherein the first recording plasmid is the recording plasmid of embodiment 171.

[0866] Embodiment 295. The method of embodiment 293, wherein the second recording plasmid is the recording plasmid of embodiment 172.

[0867] Embodiment 296. The method of embodiment 293, wherein the resetting comprises contacting the cell with an antibiotic.

[0868] Embodiment 297. The method of embodiment 296, wherein the cell is contacted with between 1 μg/mL and 20 μg/mL of the antibiotic.

[0869] Embodiment 298. The method of embodiment 296 or 297, wherein the antibiotic is chloramphenicol and/or kanamycin.

[0870] Embodiment 299. The method of embodiment 298, wherein the antibiotic reduces the amount of R2.

[0871] Embodiment 300. The method of embodiment 299, wherein the antibiotic is kanamycin.

[0872] Embodiment 301. The method of any one of embodiments 293-300, wherein the resetting comprises contacting the cell with a second antibiotic.

[0873] Embodiment 302. The method of embodiment 301, wherein the cell is contacted with between 1 μg/mL and 20 μg/mL of the second antibiotic.

[0874] Embodiment 303. The method of embodiment 302, wherein the second antibiotic reduces the amount of R1.

[0875] Embodiment 304. The method of embodiment 302 or 303, wherein the second antibiotic is chloramphenicol.

[0876] Embodiment 305. The method of any one of embodiments 293-304, wherein the resetting is achieved by contacting the cell with the first antibiotic and/or the second antibiotic for at least 6 hours, 8 hours, 10 hours, 12 hours, 24 hours, or more.

[0877] Embodiment 306. The method of any one of embodiments 293-304, wherein the cell is contacted with the first antibiotic and/or the second antibiotic at least once.

[0878] Embodiment 307. The method of embodiment 306, wherein the cell is contacted with the first antibiotic and/or the second antibiotic at least two, at least three, at least four, at least five, at least six, at least seven, at least eight, at least nine, or at least ten times.

[0879] Embodiment 308. The method of any one of embodiments 293-307, wherein the ratio of R1 to R2 after resetting is within 1%, 2%, 3%, 4%, 5%, 6%, 7%, 8%, 9%, or 10% of the ratio after the cell has been exposed to the stimulus.

[0880] Embodiment 309. The method of any one of embodiments 273-308, wherein the cell is exposed to a second stimulus, and wherein the second stimulus induces expression of the napDNAbp and/or expression of the sgRNA encoded by the writing plasmid.

[0881] Embodiment 310. The method of embodiment 309, wherein the second stimulus induces expression of the napDNAbp, the first sgRNA, and/or the second sgRNA encoded by the writing plasmid.

[0882] Embodiment 311. The method of embodiment 310, wherein the second stimulus induces expression of the napDNAbp encoded by the writing plasmid.

[0883] Embodiment 312. The method of embodiment 310, wherein the second stimulus induces expression of the first sgRNA encoded by the writing plasmid.

[0884] Embodiment 313. The method of embodiment 310, wherein the second stimulus induces expression of the second sgRNA encoded by the writing plasmid.

[0885] Embodiment 314. The method of any one of embodiments 309-313, wherein the second stimulus is a small molecule, a protein, a peptide, an amino acid, a metabolite, an inorganic molecule, an organometallic molecule, an organic molecule, a drug or drug candidate, a sugar, a lipid, a metal, a nucleic acid, a molecule produced during the activation of an endogenous or an exogenous signaling cascade, light, heat, sound, pressure, mechanical stress, shear stress, or a virus or other microorganism, change in pH, or change in oxidation/reduction state.

[0886] Embodiment 315. The method of embodiment 314, wherein the cell is contacted with the first stimulus and the second stimulus simultaneously.

[0887] Embodiment 316. The method of embodiment 314, wherein the cell is contacted with the first stimulus and the second stimulus sequentially.

[0888] Embodiment 317. The method of any one of embodiments 309-316, wherein the first stimulus induces expression of the napDNAbp encoded by the writing plasmid and the second stimulus induces expression of an sgRNA encoded by the writing plasmid, and wherein both stimuli are required for sgRNA association with the napDNAbp.

[0889] Embodiment 318. The method of embodiment 317, wherein the napDNAbp introduces a DNA double-strand break in the target sequence of the recording plasmid complementary to the sgRNA, thereby reducing the amount of the recording plasmid.

[0890] Embodiment 319. The method of embodiment 317, wherein the napDNAbp introduces a DNA double-strand break in the target sequence of the recording plasmid complementary to the sgRNA, thereby reducing the amount of functional reporter protein expressed in the cell.

[0891] Embodiment 320. The method of any one of embodiments 309-319, wherein the cell is contacted with the second stimulus at least once.

[0892] Embodiment 321. The method of embodiment 320, wherein the cell is contacted with the stimulus at least two, three, four, five, six, seven, eight, nine, or ten times.

[0893] Embodiment 322. A method for recording the presence and/or duration of a stimulus in an engineered cell, the method comprising:
[0894] (i) providing an engineered cell comprising the cell data recorder system of any one of embodiments 193-197; and
[0895] (ii) determining the percentage of base editing in a target sequence of the recording plasmid.

[0896] Embodiment 323. The method of embodiment 322, wherein the engineered cell is produced by the method of any one of embodiments 226-238.

[0897] Embodiment 324. The method of embodiment 322 or 323, wherein the cell data recorder system comprises (i) a fusion protein comprising an napDNAbp and a nucleic acid editing protein and (ii) an sgRNA complementary to the target sequence of the recording plasmid, wherein the sgRNA associates with the napDNAbp under conditions that induce the expression of the fusion protein and the sgRNA.

[0898] Embodiment 325. The method of embodiment 324, wherein the sgRNA is encoded by the writing plasmid, and wherein the nucleic acid sequence encoding the sgRNA is operably linked to a promoter.

[0899] Embodiment 326. The method of embodiment 324, wherein the napDNAbp is a dCas9 domain or a Cas9n domain.

[0900] Embodiment 327. The method of embodiment 324, wherein the nucleic acid editing protein is a deaminase domain.

[0901] Embodiment 328. The method of embodiment 324, wherein the target sequence is present in a reporter gene encoding a functional reporter protein.

[0902] Embodiment 329. The method of embodiment 328, wherein the functional reporter protein is a fluorescent protein.

[0903] Embodiment 330. The method of embodiment 329, wherein the fluorescent protein is EGFP.

[0904] Embodiment 331. The method of embodiment 322 or 323, wherein the percentage of base editing in the target sequence is determined using high-throughput sequencing of the amplified target sequence.

[0905] Embodiment 332. The method of any one of embodiments 322-331, wherein the cell is not contacted with a stimulus.

[0906] Embodiment 333. The method of any one of embodiments 322-331 further comprising contacting the cell with a stimulus, wherein the stimulus induces the expression of the fusion protein and/or the sgRNA encoded by the writing plasmid.

[0907] Embodiment 334. The method of embodiment 333, wherein the stimulus is a small molecule, a protein, a peptide, an amino acid, a metabolite, an inorganic molecule, an organometallic molecule, an organic molecule, a drug or drug candidate, a sugar, a lipid, a metal, a nucleic acid, a molecule produced during the activation of an endogenous or an exogenous signaling cascade, light, heat, sound, pressure, mechanical stress, shear stress, or a virus or other microorganism, change in pH, or change in oxidation/reduction state.

[0908] Embodiment 335. The method of any one of embodiments 333-334, wherein the cell is contacted with the stimulus at least once.

[0909] Embodiment 336. The method of any one of embodiments 333-334, wherein the fusion protein edits a base in the target sequence.

[0910] Embodiment 337. The method of embodiment 336, wherein the fusion protein introduces a single C·G to T·A mutation in the strand of the target sequence not bound by the sgRNA associated with the napDNAbp.

[0911] Embodiment 338. The method of embodiment 336 or 337, wherein the base edit introduced by the fusion protein results in a reporter gene that does not encode a functional reporter protein, thereby reducing the amount of functional reporter protein expressed in the cell.

[0912] Embodiment 339. The method of any one of embodiments 333-338, wherein the cell is contacted with the stimulus at least two, three, four, five, six, seven, eight, nine, or ten times.

[0913] Embodiment 340. The method of any one of embodiments 322-339, wherein the determining of (ii) is performed one, two, three, four, five, six, seven, eight, nine, or ten times.

[0914] Embodiment 341. The method of any one of embodiments 322-340, further comprising (iv) comparing the percentage of base editing in the target sequence in the presence of the stimulus to the percentage of base editing in the absence of the stimulus.

[0915] Embodiment 342. The method of embodiment 341, wherein the percentage of base editing in the target sequence does not significantly change in the absence of the stimulus.

[0916] Embodiment 343. The method of embodiment 341, wherein a change in the percentage of base editing in the target sequence indicates the presence of the stimulus.

[0917] Embodiment 344. The method of embodiment 343, wherein the percentage of base editing in the target sequence increases in the presence of the stimulus.

[0918] Embodiment 345. The method of embodiment 344, wherein the percentage of base editing increases by at least 1%, 5%, 10%, 15%, 20%, 25%, 30%, 35%, 40%, 45%, 50%, 55%, 60%, 65%, 70%, 75%, 80%, or 85% in the presence of the stimulus.

[0919] Embodiment 346. The method of embodiment 344, wherein the percentage of base editing increases by at least 2-fold, 3-fold, 4-fold, or 5-fold in the presence of the stimulus.

[0920] Embodiment 347. The method of any one of embodiments 341-346, wherein the comparing of (iv) is performed one, two, three, four, five, six, seven, eight, nine, or ten times.

[0921] Embodiment 348. The method of any one of embodiments 322-347, wherein the cell is exposed to a second stimulus, and wherein the second stimulus induces expression of the fusion protein and/or expression of an sgRNA encoded by the writing plasmid.

[0922] Embodiment 349. The method of embodiment 348, wherein the cell is exposed to a second stimulus, and wherein the second stimulus induces expression of the fusion protein the and/or expression of one or more of the sgRNAs encoded by the writing plasmid.

[0923] Embodiment 350. The method of embodiment 348 or 349, wherein the second stimulus induces expression of the napDNAbp, a first sgRNA, a second sgRNA, and/or a third sgRNA encoded by the writing plasmid.

[0924] Embodiment 351. The method of embodiment 348 or 349, wherein the second stimulus induces expression of the fusion protein encoded by the writing plasmid.

[0925] Embodiment 352. The method of embodiment 348 or 349, wherein the second stimulus induces expression of the first sgRNA encoded by the writing plasmid.

[0926] Embodiment 353. The method of embodiment 348 or 349, wherein the second stimulus induces expression of the second sgRNA encoded by the writing plasmid.

[0927] Embodiment 354. The method of embodiment 348 or 349, wherein the second stimulus induces expression of the third sgRNA encoded by the writing plasmid.

[0928] Embodiment 355. The method of any one of embodiments 348-354, wherein the second stimulus is a small molecule, a protein, a peptide, an amino acid, a metabolite, an inorganic molecule, an organometallic molecule, an organic molecule, a drug or drug candidate, a sugar, a lipid, a metal, a nucleic acid, a molecule produced during the activation of an endogenous or an exogenous signaling cascade, light, heat, sound, pressure, mechanical stress, shear stress, or a virus or other microorganism, change in pH, or change in oxidation/reduction state.

[0929] Embodiment 356. The method of embodiment 355, wherein the cell is contacted with the first stimulus and the second stimulus simultaneously.

[0930] Embodiment 357. The method of embodiment 355, wherein the cell is contacted with the first stimulus and the second stimulus sequentially.

[0931] Embodiment 358. The method of any one of embodiments 348-357, wherein the first stimulus induces expression of the fusion protein encoded by the writing plasmid and the second stimulus induces expression of an sgRNA encoded by the writing plasmid, and wherein both stimuli are required for sgRNA association with the napDNAbp of the fusion protein.

[0932] Embodiment 359. The method of any one of embodiments 322-358, wherein the cell is exposed to a third stimulus, and wherein the third stimulus induces expression of the fusion protein and/or expression of an sgRNA encoded by the writing plasmid.

[0933] Embodiment 360. The method of embodiment 359, wherein the first stimulus induces expression of the fusion protein encoded by the writing plasmid, the second stimulus induces expression of the first sgRNA encoded by the writing plasmid, and the third stimulus induces expression of the second sgRNA encoded by the writing plasmid.

[0934] Embodiment 361. The method of embodiment 359 or 360, wherein the fusion protein edits a base in the target sequence in response to a first stimulus and a second stimulus, thereby providing a new target sequence comprising a base edit.

[0935] Embodiment 362. The method of embodiment 361, wherein the fusion protein and edits a base in the new target strand in response to a third stimulus.

[0936] Embodiment 363. The method of embodiment 359, wherein the cell is contacted with the second and/or the third stimulus at least once.

[0937] Embodiment 364. The method of embodiment 363, wherein the cell is contacted with the second and/or the stimulus at least two, three, four, five, six, seven, eight, nine, or ten times.

[0938] Embodiment 365. A method for recording the presence and/or duration of a stimulus in an engineered cell, the method comprising:
[0939] (i) providing an engineered cell comprising the cell data recorder system of any one of embodiments 198-202; and
[0940] (ii) determining the percentage of base editing in a target sequence of the recording gene present in the genome of the cell.

[0941] Embodiment 366. The method of embodiment 365, wherein the engineered cell is produced by the method of any one of embodiments 239-256.

[0942] Embodiment 367. The method of embodiment 365 or 366, wherein the cell data recorder system comprises (i) a fusion protein comprising an napDNAbp and a nucleic acid editing protein and (ii) an sgRNA complementary to the target sequence of a recording gene, wherein the sgRNA associates with the napDNAbp under conditions that induce the expression of the fusion protein and the sgRNA.

[0943] Embodiment 368. The method of embodiment 367, wherein the sgRNA is expressed by the cell.

[0944] Embodiment 369. The method of embodiment 367, wherein the sgRNA is encoded by a plasmid.

[0945] Embodiment 370. The method of embodiment 369, wherein the sgRNA is encoded by the writing plasmid, and wherein the nucleic acid sequence encoding the sgRNA is operably linked to a promoter.

[0946] Embodiment 371. The method of embodiment 367, wherein the napDNAbp is a dCas9 domain or a Cas9n domain.

[0947] Embodiment 372. The method of embodiment 367, wherein the nucleic acid editing protein is a deaminase domain.

[0948] Embodiment 373. The method of embodiment 365, wherein the target sequence is present in a safe harbor locus of a gene in the genome of the cell.

[0949] Embodiment 374. The method of embodiment 373, wherein the safe harbor locus is a safe harbor locus of the CCR5 gene.

[0950] Embodiment 375. The method of embodiment 365 or 366, wherein the percentage of base editing in the target sequence is determined using high-throughput sequencing of the amplified target sequence.

[0951] Embodiment 376. The method of any one of embodiments 365-375, wherein the cell is not contacted with a stimulus.

[0952] Embodiment 377. The method of any one of embodiments 365-375 further comprising contacting the cell with a stimulus, wherein the stimulus induces the expression of the fusion protein and/or the sgRNA encoded by the writing plasmid or expressed by the cell.

[0953] Embodiment 378. The method of embodiment 377, wherein the stimulus is a small molecule, a protein, a peptide, an amino acid, a metabolite, an inorganic molecule, an organometallic molecule, an organic molecule, a drug or drug candidate, a sugar, a lipid, a metal, a nucleic acid, a molecule produced during the activation of an endogenous or an exogenous signaling cascade, light, heat, sound, pressure, mechanical stress, shear stress, or a virus or other microorganism, change in pH, or change in oxidation/reduction state.

[0954] Embodiment 379. The method of any one of embodiments 377-378, wherein the cell is contacted with the stimulus at least once.

[0955] Embodiment 380. The method of any one of embodiments 377-379, wherein the fusion protein edits a base in the target sequence.

[0956] Embodiment 381. The method of embodiment 380, wherein the fusion protein introduces a single C·G to T·A mutation in the strand of the target sequence not bound by the sgRNA associated with the fusion protein.

[0957] Embodiment 382. The method of any one of embodiments 377-381, wherein the cell is contacted with the stimulus at least two, three, four, five, six, seven, eight, nine, or ten times.

[0958] Embodiment 383. The method of any one of embodiments 365-382, wherein the determining of (ii) is performed one, two, three, four, five, six, seven, eight, nine, or ten times.

[0959] Embodiment 384. The method of any one of embodiments 365-383, further comprising (iv) comparing the percentage of base editing in the target sequence in the presence of the stimulus to the percentage of base editing in the absence of the stimulus.

[0960] Embodiment 385. The method of embodiment 384, wherein the percentage of base editing in the target sequence does not significantly change in the absence of the stimulus.

[0961] Embodiment 386. The method of embodiment 384, wherein a change in the percentage of base editing in the target sequence indicates the presence of the stimulus.

[0962] Embodiment 387. The method of embodiment 386, wherein the percentage of base editing in the target sequence increases in the presence of the stimulus.

[0963] Embodiment 388. The method of embodiment 387, wherein the percentage of base editing increases by at least 1%, 5%, 10%, 15%, 20%, 25%, 30%, 35%, 40%, 45%, 50%, 55%, 60%, 65%, 70%, 75%, 80%, or 85% in the presence of the stimulus.

[0964] Embodiment 389. The method of embodiment 387, wherein the percentage of base editing increases by at least 2-fold, 3-fold, 4-fold, or 5-fold in the presence of the stimulus.

[0965] Embodiment 390. The method of any one of embodiments 384-389, wherein the comparing of (iv) is performed one, two, three, four, five, six, seven, eight, nine, or ten times.

[0966] Embodiment 391. The method of any one of embodiments 377-390, wherein the cell is contacted with a second stimulus.

[0967] Embodiment 392. The method of embodiment 391, wherein the second stimulus is a small molecule, a protein, a peptide, an amino acid, a metabolite, an inorganic molecule, an organometallic molecule, an organic molecule, a drug or drug candidate, a sugar, a lipid, a metal, a nucleic acid, a molecule produced during the activation of an endogenous or an exogenous signaling cascade, light, heat, sound, pressure, mechanical stress, shear stress, or a virus or other microorganism, change in pH, or change in oxidation/reduction state.

[0968] Embodiment 393. The method of any one of embodiments 391 or 392, wherein the cell is contacted with the second stimulus at least once.

[0969] Embodiment 394. The method of embodiment 393, wherein the cell is contacted with the second stimulus at least two, three, four, five, six, seven, eight, nine, or ten times.

TABLE 1
Final indel rates observed in CAMERA 1.2 and 1.3
after multiple rounds of recording and erasing.

| | | Indel |
|---|---|---|
| sample | treatment | (%) |
| CAMERA 1.2 | reset-round 3-replicate #1 | 0.054 |
| CAMERA 1.2 | reset-round 3-replicate #2 | 0.013 |
| CAMERA 1.2 | reset-round 3-replicate #3 | 0.014 |
| CAMERA 1.3-36% R3 | aTc IPTG-treatment 4-repliate #1 | 0.022 |
| CAMERA 1.3-36% R3 | aTc IPTG-treatment 4-repliate #2 | 0.021 |
| CAMERA 1.3-36% R3 | aTc IPTG-treatment 4-repliate #3 | 0.023 |
| CAMERA 1.3-77% R3 | aTc rhamnose-treatment 3-repliate #1 | 0.022 |
| CAMERA 1.3-77% R3 | aTc rhamnose-treatment 3-repliate #2 | 0.026 |
| CAMERA 1.3-77% R3 | aTc rhamnose-treatment 3-repliate #3 | 0.029 |

TABLE 2
CAMERAs developed in this work.

| | Recording | Writing | | |
|---|---|---|---|---|
| CAMERA | plasmid | plasmid | Readout | Functions |
| 1.0 | R1/R2 | 1.0.3 | EGFP | Record the |
| | | P_{TetO}-sd2U-Cas9 | fluorescence, | concentration and |
| | | and P_{Lac}-sgRNA1 | R1:R2 ratio | duration of aTc |
| | | | | exposure |
| 1.1 | R1/R2 | 1.1 | EGFP | Record the |
| | | P_{TetO}-sd2U-Cas9 | fluorescence, | concentration and |
| | | and P_{LacO}-sgRNA1 | R1:R2 ratio | duration of aTc and |
| | | | | IPTG exposure |
| 1.2 | R3/R4 | 1.2 | EGFP | Record the |
| | | P_{TetO}-sd2U-Cas9 | fluorescence, | concentration and |
| | | and P_{LacO}-sgRNA1 | R3:R4 ratio | duration of aTc and |
| | | | | IPTG exposure, |
| | | | | with erasing upon |
| | | | | kanamycin treatment |
| 1.3 | R3/R4 | 1.3 | EGFP | Record the |
| | | P_{TetO}-sd2U-Cas9, | fluorescence, | concentration and |
| | | P_{LacO}-sgRNA1, | R3:R4 ratio | duration of aTc and |
| | | and P_{Rha}-sgRNA2 | | IPTG exposure, |
| | | | | with erasing by |
| | | | | rhamnose treatment |
| 2.0 | R1 | 2.0 | G:G to T:A | Record the |
| | | P_{TetO}-SD8-BE2 | editing at | concentration and |
| | | and P_{Lac}-sgRNA1 | position 166 | duration of aTc |
| | | | of EGFP | exposure |
| 2.1 | R1 | 2.1 | G:G to T:A | Record the |
| | | P_{TetO}-SD8-BE2 | editing at | concentration and |
| | | and P_{LacO}-sgRNA1 | position 166 | duration of aTc and |
| | | | of EGFP | IPTG exposure |
| 2.2 | R1 | 2.2 | G:G to T:A | Record the |
| | | P_{TetO}-SD8-BE2 | editing at | concentration and |
| | | and P_{BAD}-sgRNA3 | position 186 | duration of aTc and |
| | | | of EGFP | arabinose exposure |
| 2.3 | R1 | 2.3 | G:G to T:A | Record the |
| | | P_{TetO}-SD8-BE2 | editing at | concentration and |
| | | and P_{Rha}-sgRNA4 | position 195 | duration of aTc and |
| | | | of EGFP | rhamnose exposure |
| 2.4 | R1 | 2.4 | G:G to T:A | Record exposure |
| | | P_{TetO}-SD8-BE2, | editing at | to aTc, IPTG, |
| | | P_{LacO}-sgRNA1, | positions 166, | arabinose, and |
| | | P_{BAD}-sgRNA3, | 186 and 195 | rhamnose in an |
| | | and P_{Rha}-sgRNA4 | of EGFP | independent manner |
| 2.5 | R5 | 2.5 | G:G to T:A | Record the |
| | | P_{TetO}-SD8-BE2, | editing at at | presence of |
| | | P_{BAD}-sgRNA5, | positions 129, | aTc/arabinose and |
| | | and P_{Rha}-sgRNA6 | 205-207 and | aTc/rhamnose in an |
| | | | 216 of EGFP | order-dependent manner |
| 2.6 | R1 | 2.6 | G:G to T:A | Record phage infection |
| | | P_{TetO}-SD8-BE2 | editing at | |
| | | and P_{PSP}-sgRNA1 | position 166 | |
| | | | of EGFP | |
| 2.7 | R6 | 2.7 | G:G to T:A | Record light exposure |
| | | P_{R}-RBS-BE2, | editing at | |
| | | P_{FixK2}-cI, | position 166 | |
| | | P_{LacIq}-YF1/FixJ, | of EGFP | |
| | | and P_{LacO}-sgRNA1 | | |
| 2m.0 | CCR5 | 2m.0 | G:G to T:A | Multiplexed |
| | (genomic | CMV-BE3 | editing at | recording using |
| | loci) | U6-sgRNA A | positions 378. | three individual |
| | | U6-sgRNA B | 422 and 443 | guide RNAs |
| | | U6-sgRNA C | of CCR5 | |
| 2m.1 | CCR5 | 2m.1 | G:G to T:A | Record the |
| | (genomic | TRE3G-BE3 | editing at | presence of |
| | loci) | CMV-Tet3G | position 422 | doxycycline |
| | | U6-sgRNA B | of CCR5 | |
| 2m.2 | CCR5 | 2m.2 | G:G to T:A | Record the |
| | (genomic | CMV-BE3 | editing at | presence of |
| | loci) | UBC-TetR-P2A-LacI | positions 378 | doxycycline |
| | | U6_{LacI}-sgRNA A | and 422 of | and IPTG |
| | | H1_{TetR}-sgRNA B | CCR5 | |
| 2m.3.1 | CCR5 | 2m.3.1 | G:G to T:A | Record Wnt |
| | (genomic | (TCF/LEF)₇-BE3 | editing at | signaling |
| | loci) | U6-sgRNA B | position 422 | |
| | | | of CCR5 | |
| 2m.3.2 | CCR5 | 2m.3.2 | G:G to T:A | Record Wnt |
| | (genomic | (TCF/LEF)₇- | editing at | signaling |
| | loci) | BE3-P2A-Luc | position 422 | |
| | | U6-sgRNA B | of CCR5 | |

TABLE 3
Summary of plasmid constructs.

| | | Antibiotic | Origin of | Promoter | |
|---|---|---|---|---|---|
| Name | Class | Resistance | Replication | (−RBS) | Gene |
| pWT004a | R1 | Carb | pUC | P_{BAD} | EGFP |
| pWT004b | R2 | Carb | pUC | P_{BAD} | EGFP-151TGA |
| pWT018a | R3 | ΔChlo-Kan | pUC | P_{BAD} | EGFP |
| pWT018e | R4 | Chlo-ΔKan | pUC | P_{BAD} | EGFP-151TGA |
| pWT004j | R5 | Carb | pUC | P_{BAD} | EGFP-115- |
| | | | | | 135insertion, |
| | | | | | T206G |
| pWT009d | R6 | Carb | RSF1030 | P_{BAD} | EGFP |
| pWT007a | W1.0.1 | Spect | SC101 | P_{TetO}-SD8 | Cas9 |
| | | | | P_{Lac} | sgRNA1 |
| pWT007g | W1.0.2 | Spect | SC101 | P_{TetO}-sd2 | Cas9 |
| | | | | P_{Lac} | sgRNA1 |
| pWT007f | W1.0.3 | Spect | SC101 | P_{TetO}-sd2U | Cas9 |
| | | | | P_{Lac} | sgRNA1 |
| pWT007h | W1.0.1c | Spect | SC101 | P_{TetO}-SD8 | Cas9 |
| | | | | P_{Lac} | sgRNA(con.) |
| pWT019a | W1.1 | Spect | SC101 | P_{TetO}-sd2U | Cas9 |
| | | | | P_{LacO} | sgRNA1 |
| pWT019b | W1.2 | Spect | SC101 | P_{TetO}-sd2U | Cas9 |
| | | | | P_{LacO} | sgRNA1 |
| | | | | P_{Rha} | sgRNA2 (sgRNA1- |
| | | | | | G19T-G20C) |
| pWT021a | W2.0 | Spect | SC101 | P_{TetO}-SD8 | BE2 |
| | | | | P_{Lac} | sgRNA1 |
| pWT037a | W2.1 | Spect | SC101 | P_{TetO}-SD8 | BE2 |
| | | | | P_{LacO} | sgRNA1 |
| pWT046a | W2.2 | Spect | SC101 | P_{TetO}-SD8 | BE2 |
| | W2.4-1 | | | P_{BAD} | sgRNA3 |
| pWT046b | W2.3 | Spect | SC101 | P_{TetO}-SD8 | BE2 |
| | | | | P_{Rha} | sgRNA4 |
| pWT050a | W2.4-2 | Chlo | CloDF13 | P_{LacO} | sgRNA1 |
| | | | | P_{Rha} | sgRNA4 |
| pWT046e | W2.5-1 | Spect | SC101 | P_{TetO}-SD8 | BE2 |
| | | | | P_{BAD} | sgRNA5 |
| | | | | | (sgRNA3-A8C) |
| pWT050d | W2.5-2 | Chlo | CloDF13 | P_{LacO} | sgRNA1 |
| | | | | P_{Rha} | sgRNA6-(sgRNA4- |
| | | | | | C16T-C18T) |
| pWT045c | W2.6 | Spect | SC101 | P_{TetO}-SD8 | BE2 |
| | | | | P_{PSP} | sgRNA1 |
| pWT047c | W2.7-1 | Spect | SC101 | P_{R}-sd5 | BE2 |
| | | | | P_{Lac} | sgRNA1 |
| pDawn | W2.7-2 | Kan | CloE1 | P_{R} | cI |
| | | | | P_{FixK2} | YF1-FixJ |
| | | | | P_{LacIq} | |
| pACK129 | W2m.0-1 | Carb | CloE1 | CMV | BE3 |
| | W2m.2-1 | | | | |
| pWT060b | W2m.0-2 | Carb | CloE1 | U6 | sgRNA A(CCR5) |
| pWT060e | W2m.0-3 | Carb | CloE1 | U6 | sgRNA B(CCR5) |
| | W2m.1-2 | | | | |
| | W2m.3-2 | | | | |
| pWT060j | W2m.0-4 | Carb | CloE1 | U6 | sgRNA C(CCR5) |
| pWT063a | W2m.1-1 | Carb | CloE1 | P_{TRE3G} | BE3 |
| pWT062a | W2m.2-2 | Carb | CloE1 | UBC | TetR-P2A-LacI |
| pWT062e | W2m.2-3 | Carb | CloE1 | U6_{LacI} | sgRNA A |
| pWT062d | W2m.2-4 | Carb | CloE1 | H1_{TetR} | sgRNA B |
| pWT065a | W2m.3.1-1 | Carb | CloE1 | (TCF/LEF)₇ | BE3 |
| pWT065c | W2m.3.2-1 | Carb | CloE1 | (TCF/LEF)₇ | BE3-P2A-Luc |

TABLE 4
Genotypes of bacterial strains used.

| Strain | Genotype |
|---|---|
| S1030 | F′proA+B+ Δ(lacIZY) zzf::Tn10(TetR) lacIQ1PN25-tetR luxCDE/endA1 recA1 galE15 |
| | galK16 nupG rpsL(StrR) ΔlacIZYA araD139 Δ(ara, leu)7697 mcrA Δ(mrr-hsdRMS- |
| | mcrBC) proBA::pir116 araE201 ΔrpoZ Δflu ΔcsgABCDEFG ΔpgaC λ− |
| S2063 | F′proA+B+ Δ(lacIZY) zzf::Tn10 lacIQ1 PN25-tetR luxCDE Ppsp(AR2) lacZ luxR Plux |
| | groESL/endA1 recA1 galE15 galK16 nupG rpsL ΔlacIZYA araD139 Δ(ara, leu)7697 |
| | mcrA Δ(mrr-hsdRMS-mcrBC) proBA::pir116 |
| | araE201 ΔrpoZ Δflu ΔcsgABCDEFG ΔpgaC ΔpspBC λ− |

TABLE 5
Spacer sequences of guide RNAs used in this work.
Base editing target sites are underlined. Mutated
sites of modified EGFP genes in different
recording plasmids are in bold.

| sgRNA | Spacer sequence |
|---|---|
| sgRNA-1 | GGGCACGGGCAGCTTGCCGG |
| | (SEQ ID NO: 701) |
| sgRNA-2 | GGGCACGGGCAGCTTGCCTC |
| | (SEQ ID NO: 702) |
| sgRNA-3 | GTGGTCACGAGGGTGGGCCA |
| | (SEQ ID NO: 703) |
| sgRNA-4 | GTAGGTCAGGGTGGTCACGA |
| | (SEQ ID NO: 704) |
| sgRNA-5 | GTGGTCCCGAGGGTGGGCCA |
| | (SEQ ID NO: 705) |
| sgRNA-6 | GTAGGTCAGGGTGGTAAAGA |
| | (SEQ ID NO: 706) |
| sgRNA-A(CCR5) | GGTACCTATCGATTGTCAGG |
| | (SEQ ID NO: 707) |
| sgRNA-B(CCR5) | CAGGACGGTCACCTTTGGGG |
| | (SEQ ID NO: 708) |
| sgRNA-C(CCR5) | GGTGACAAGTGTGATCACTT |
| | (SEQ ID NO: 709) |

TABLE 6
Primer sequences of high-throughput sequencing used in this work.
Sequences that anneal to the templates are in italic.

| primer | sequence |
|---|---|
| EGFP_adapter_F_1 | ACACTCTTTCCCTACACGACGCTCTTCCGATCTCGGCCACAAGTTCAGCG |
| | (SEQ ID NO: 710) |
| EGFP_adapter_F_2 | ACACTCTTTCCCTACACGACGCTCTTCCGATCTNNNNCGGCCACAAGTTCAGCG |
| | (SEQ ID NO: 711) |
| EGFP_adapter_F_3 | ACACTCTTTCCCTACACGACGCTCTTCCGATCTNNNNACGGCCACAAGTTCAGCG |
| | (SEQ ID NO: 712) |
| EGFP_adapter_F_4 | ACACTCTTTCCCTACACGACGCTCTTCCGATCTNNNNACGGCGACGTAAACGG |
| | (SEQ ID NO: 713) |
| EGFP_adapter_R_1 | TGGAGTTCAGACGTGTGCTCTTCCGATCTCTTCGGGCATGGCGG (SEQ ID NO: 714) |
| EGFP_adapter_R_2 | TGGAGTTCAGACGTGTGCTCTTCCGATCTGCTGCTTCATGTGGTCG (SEQ ID NO: 715) |
| EGFP_amplicon_F | ACGGCGACGTAAACGG (SEQ ID NO: 716) |
| (single cell PCR) | |
| EGFP_amplicon_R | GCTGCTTCATGTGGTCG (SEQ ID NO: 717) |
| (single cell PCR) | |
| CCR5_adapter_F_1 | ACACTCTTTCCCTACACGACGCTCTTCCGATCTNNNNCTGTCCCCTTCTGGGC |
| | (SEQ ID NO: 718) |
| CCR5_adapter_F_2 | ACACTCTTTCCCTACACGACGCTCTTCCGATCTNNNNTACTGTCCCCTTCTGGGC |
| | (SEQ ID NO: 719) |
| CCR5_adapter_F_3 | ACACTCTTTCCCTACACGACGCTCTTCCGATCTNNNNGTCGTCCATGCTGTGTTTGC |
| | (SEQ ID NO: 720) |
| CCR5_adapter_R | TGGAGTTCAGACGTGTGCTCTTCCGATCTGGAAAATGAGAGCTGCAGG (SEQ ID |
| | NO: 721) |

TABLE 7
Additional exemplary bacterial promoter sequences.

| Promoter | Inducer | Sequence |
|---|---|---|
| Lac | lactose/IPTG | TTTACACTTTATGCTTCCGGCTCGTATGTT |
| | | (SEQ ID NO: 809) |
| LacO | lactose/IPTG | TTGTGAGCGGATAACAA (SEQ ID NO: 810) |
| LacUV5 | lactose/IPTG | TTTACACTTTATGCTTCCGGCTCGTATAATG |
| | | (SEQ ID NO: 811) |
| Trp | Tryptophan starvation or | TTGACAATTAATCATCGAACTAGTTAACT |
| | addition of B- | (SEQ ID NO: 812) |
| | indoleacrylic acid | |
| Tac (hybrid of | lactose/IPTG | TTGACAATTAATCATCGGCTCGTATAATG |
| trp and lacUV5 | | (SEQ ID NO: 813) |
| promoters) | | |
| Trc (hybrid of | lactose/IPTG | TTGACAATTAATCATCCGGCTCGTATAATG |
| trp and lacUV5 | | (SEQ ID NO: 814) |
| promoters) | | |
| TetO | Anhydrotetracycline | TCCCTATCAGTGATAGAGA (SEQ ID NO: 815) |
| | (aTc) | |
| TetA | Anhydrotetracycline | TTGACACTCTATCATTGATAGAGTTATTTT |
| | (aTc) | (SEQ ID NO: 816) |
| T7 | thermal, requires T7 | TAATACGACTCACTATAGG (SEQ ID NO: 817) |
| | RNA polymerase | |
| T7-lac operator | IPTG | The T7lac promoter contains a 25 bp lac |
| | | operator sequence immediately downstream |
| | | from the 17 bp promoter region. |
| T3-lac operator | IPTG | AATTAACCCTCACTAAAGG (SEQ ID NO: 818) |
| | | and a 25 bp lac operator sequence |
| | | immediately downstream |
| T5-lac operator | IPTG | TCATAAAAAATTTATTTGCTTTGTGAGCGG |
| | | ATAACAATTATAATA (with embedded LacO) |
| | | (SEQ ID NO: 819) |
| araBAD | arabinose | AAAGCCATGACAAAAACGCGTAACAAAAG |
| | | TGTCTATAATCACGGCAGAAAAGTCCACAT |
| | | TGATTATTTGCACGGCGTCACACTTTGCTAT |
| | | GCCATAGCATTTTTATCCATAAGATTAGCG |
| | | GATCCTACCTGACGCTTTTTATCGCAACTCT |
| | | CTACTGTTTCTCCAT (SEQ ID NO: 820) |
| pRha | rhamnose | ATTGCGAGCTCTATTCCGTGATAATTTGG |
| | | (SEQ ID NO: 821) |
| rhaBAD | rhamnose | CACCACAATTCAGCAAATTGTGAACATCAT |
| | | CACGTTCATCTTTCCCTGGTTGCCAATGGCC |
| | | CATTTTCCTGTCAGTAACGAGAAGGTCGCG |
| | | AATTCAGGCGCTTTTTAGACTGGTCGTA |
| | | (SEQ ID NO: 822) |
| lambda pL | thermal/heat inducible | TATCTCTGGCGGTGTTGACATAAATACCAC |
| | | TGGCGGTGATACTGAGCACATCAGCAGGA |
| | | (SEQ ID NO: 823) |
| lambda pR | thermal/heat inducible | TAACACCGTGCGTGTTGACTGTTTTACCTCT |
| | | GGCGGTGATAATGGTTGCATGTACTAAG |
| | | (SEQ ID NO: 824) |
| PesaR | 3OC6HSL (Quorum | GCAGATTGAGTAACCGTGAATGTTTGTACA |
| (contains | sensing molecule) | AATGTTTCAAAGATGTTACTATGAGTGTCC |
| luciferase) | | CGGCCAGCATCACTTTATATTTTGTGACGTC |
| | | TGGCCGGACGTTTTCCCTAGTGTTGGCTGTT |
| | | TTAGCGACCTGGCCGTACAGGTCAGGTTTT |
| | | TTTTTACCGCTAAACAACTGAAGCCATTGT |
| | | AACCTCTGAATGATTCATTGTAAGTTACTCT |
| | | TAAGTATCATCTTGCCTGTACTATAGTGCAG |
| | | GTTAAGTCCACGTTAAGTAAAAGAAGCAGC |
| | | (SEQ ID NO: 825) |
| phoA | phosphate starvation | GCTTTGTTTTTATTTTTTAATGTATTTGTACA |
| | | TGGAGAAAATAAA (SEQ ID NO: 826) |
| recA | nalidixic acid | ACTTGATACTGTATGAGCATACAGTATAAT |
| | | TGCTTCAACAGAACATATTGACTATCCGGT |
| | | ATTACCCGGC (SEQ ID NO: 827) |
| SP6 | Constitutive, but requires | ATTTAGGTGACACTATAGA (SEQ ID NO: 828) |
| | SP6 RNA polymerase | |
| Ptac | Regulated like Lac | |
| | promoter | |
| pL | Temperature regulatable, | |
| | often paired with | |
| | temperature sensitive | |
| | cI857 repressor | |

TABLE 8
Additional exemplary mammalian promoter sequences.

| Promoter | Inducer | Sequence |
|---|---|---|
| LacO | lactose/IPTG | TTGTGAGCGGATAACAA (SEQ ID NO: 810) |
| TRE (tetracycline | tetracycline (Tc) or | 7 repeats of TetO seperated by spacer |
| response element) | derivatives | sequences |
| tTA (tetracyline- | tetracycline (Tc) or | fusion of tetR (tetracycline repressor) |
| controlled | derivatives, | found in E. coli, with the activation |
| transactivator) | doxycycline | domain of VP16 found in Herpes Simplex |
| (Tet-Off) | | Virus |
| rtTA (reverse | doxycycline | fusion of rtetR (reverse tetracycline |
| tetracycline- | | repressor) found in E. coli, with the |
| controlled | | activation domain of VP16 found in |
| transactivator) | | Herpes Simplex Virus |
| (Tet-On) | | |
| CMV promoters | constitutively active, but | GTGATGCGGTTTTGGCAGTACATCAAT |
| (i.e. human | also used in inducible | GGGCGTGGATAGCGGTTTGACTCACG |
| cytomegalovirus | mammalian systems in | GGGATTTCCAAGTCTCCACCCCATTGA |
| immediate-early | which it is induced by | CGTCAATGGGAGTTTGTTTTGGCACCA |
| enchancer and | tetracycline, ecdysone, or | AAATCAACGGGACTTTCCAAAATGTCG |
| promoter) | IPTG | TAACAACTCCGCCCCATTGACGCAAAT |
| | | GGGCGGTAGGCGTGTACGGTGGGAGG |
| | | TCTATATAAGCAGAGCT (SEQ ID NO: 829) |
| SV40 (simian virus | constitutive (not | GGTGTGGAAAGTCCCCAGGCTCCCCA |
| 40) (enhancer and | inducible) | GCAGGCAGAAGTATGCAAAGCATGCA |
| early promoter) | | TCTCAATTAGTCAGCAACCAGGTGTGG |
| | | AAAGTCCCCAGGCTCCCCAGCAGGCA |
| | | GAAGTATGCAAAGCATGCATCTCAATT |
| | | AGTCAGCAACCATAGTCCCGCCCCTAA |
| | | CTCCGCCCATCCCGCCCCTAACTCCGC |
| | | CCAGTTCCGCCCATTCTCCGCCCCATG |
| | | GCTGACTAATTTTTTTTATTTATGCAGA |
| | | GGCCGAGGCCGCCTCGGCCTCTGAGCT |
| | | ATTCCAGAAGTAGTGAGGAGGCTTTTT |
| | | TGGAGGCCTAGGCTTTTGCAAA (SEQ ID NO: 830) |
| EF-1 alpha | constitutive (not | GGCTCCGGTGCCCGTCAGTGGGCAGA |
| (elongation factor, | inducible) | GCGCACATCGCCCACAGTCCCCGAGA |
| non-viral) | | AGTTGGGGGGAGGGGTCGGCAATTGA |
| | | ACCGGTGCCTAGAGAAGGTGGCGCGG |
| | | GGTAAACTGGGAAAGTGATGTCGTGT |
| | | ACTGGCTCCGCCTTTTTCCCGAGGGTG |
| | | GGGGAGAACCGTATATAAGTGCAGTA |
| | | GTCGCCGTGAACGTTCTTTTTCGCAAC |
| | | GGGTTTGCCGCCAGAACACAGGTAAG |
| | | TGCCGTGTGTGGTTCCCGCGGGCCTGG |
| | | CCTCTTTACGGGTTATGGCCCTTGCGT |
| | | GCCTTGAATTACTTCCACCTGGCTGCA |
| | | GTACGTGATTCTTGATCCCGAGCTTCG |
| | | GGTTGGAAGTGGGTGGGAGAGTTCGA |
| | | GGCCTTGCGCTTAAGGAGCCCCTTCGC |
| | | CTCGTGCTTGAGTTGAGGCCTGGCCTG |
| | | GGCGCTGGGGCCGCCGCGTGCGAATC |
| | | TGGTGGCACCTTCGCGCCTGTCTCGCT |
| | | GCTTTCGATAAGTCTCTAGCCATTTAA |
| | | AATTTTTGATGACCTGCTGCGACGCTT |
| | | TTTTTCTGGCAAGATAGTCTTGTAAAT |
| | | GCGGGCCAAGATCTGCACACTGGTATT |
| | | TCGGTTTTTGGGGCCGCGGGCGGCGAC |
| | | GGGGCCCGTGCGTCCCAGCGCACATGT |
| | | TCGGCGAGGCGGGGCCTGCGAGCGCG |
| | | GCCACCGAGAATCGGACGGGGGTAGT |
| | | CTCAAGCTGGCCGGCCTGCTCTGGTGC |
| | | CTGGCCTCGCGCCGCCGTGTATCGCCC |
| | | CGCCCTGGGCGGCAAGGCTGGCCCGG |
| | | TCGGCACCAGTTGCGTGAGCGGAAAG |
| | | ATGGCCGCTTCCCGGCCCTGCTGCAGG |
| | | GAGCTCAAAATGGAGGACGCGGCGCT |
| | | CGGGAGAGCGGGCGGGTGAGTCACCC |
| | | ACACAAAGGAAAAGGGCCTTTCCGTC |
| | | CTCAGCCGTCGCTTCATGTGACTCCAC |
| | | GGAGTACCGGGCGCCGTCCAGGCACC |
| | | TCGATTAGTTCTCGAGCTTTTGGAGTA |
| | | CGTCGTCTTTAGGTTGGGGGGAGGGGT |
| | | TTTATGCGATGGAGTTTCCCCACACTG |
| | | AGTGGGTGGAGACTGAAGTTAGGCCA |
| | | GCTTGGCACTTGATGTAATTCTCCTTG |
| | | GAATTTGCCCTTTTTGAGTTTGGATCTT |
| | | GGTTCATTCTCAAGCCTCAGACAGTGG |
| | | TTCAAAGTTTTTTTCTTCCATTTCAGGT |
| | | GTCGTGA (SEQ ID NO: 831) |
| PGK1 (human or | Constitutive not | |
| mouse) | inducible) | |
| Ubc | Constitutive (not | Derived from ubiquitin C gene, e.g,, |
| | inducible) | human ubiquitin C |
| Ubi | Constitutive (not | Promoter from maize ubiquitin gene |
| | inducible) | |
| Human beta actin | Constitutive (not | |
| | inducible) | |
| CAG | Constitutive (not | |
| | inducible) | |
| Ac5 | Constitutive (not | From Drosophila Actin 5c gene |
| | inducible) | |
| Polyhedrin | Constitutive (not | From baculovirus |
| | inducible) | |
| UAS (Drosophila) | Inducible by presence of | |
| | Gal4 gene | |
| CID-based | rapamycin | |
| CaMKIIa | Inducible by | |
| | Ca2+/calmodulin | |
| GAL1, GAL10 | Inducible with galactose, | |
| | repressible by glucose | |
| GDS (aka TDH3 or | Constitutive (not | Promoter from glyceraldehyde-3-phosphate |
| GAPDH) | inducible) | dehydrogenase |
| TEF1 | Constitutive (not | Analogous to mammalian EF1a promoter |
| | inducible) | |
| ADH1 | Repressed by ethanol | Yeast promoter for alcohol dehydrogenase |
| CaMV35S | Constitutive (not | |
| | inducible) | |
| ecdysone-based | ecdysone | |
| estrogen and | estrogen or progesterone | |
| progesterone-based | hormone | |

TABLE 9
sgRNA sequences used herein.

sgRNA 1:
GGGCACGGGCAGCTTGCCGGGTTTTAGAGCTAGAAATAGCAAGTTAAAAT
AAGGCTAGTCCGTTATCAACTTGAAAAAGTGGCACCGAGTCGGTGCTTTTT
TT (SEQ ID NO: 832)
sgRNA 2:
GGGCACGGGCAGCTTGCCTCGTTTTAGAGCTAGAAATAGCAAGTTAAAAT
AAGGCTAGTCCGTTATCAACTTGAAAAAGTGGCACCGAGTCGGTGCTTTTT
TT (SEQ ID NO: 833)
sgRNA 3:
GTGGTCACGAGGGTGGGCCAGTTTTAGAGCTAGAAATAGCAAGTTAAAAT
AAGGCTAGTCCGTTATCAACTTGAAAAAGTGGCACCGAGTCGGTGCTTTTT
TT (SEQ ID NO: 834)
sgRNA 4:
GTAGGTCAGGGTGGTCACGAGTTTTAGAGCTAGAAATAGCAAGTTAAAAT
AAGGCTAGTCCGTTATCAACTTGAAAAAGTGGCACCGAGTCGGTGCTTTTT
TT (SEQ ID NO: 835)
sgRNA 5:
GTGGTCCCGAGGGTGGGCCAGTTTTAGAGCTAGAAATAGCAAGTTAAAAT
AAGGCTAGTCCGTTATCAACTTGAAAAAGTGGCACCGAGTCGGTGCTTTTT
TT (SEQ ID NO: 836)
sgRNA 6:
GTAGGTCAGGGTGGTAAAGAGTTTTAGAGCTAGAAATAGCAAGTTAAAAT
AAGGCTAGTCCGTTATCAACTTGAAAAAGTGGCACCGAGTCGGTGCTTTTT
TT (SEQ ID NO: 837)
sgRNA A:
GGTACCTATCGATTGTCAGGGTTTTAGAGCTAGAAATAGCAAGTTAAAAT
AAGGCTAGTCCGTTATCAACTTGAAAAAGTGGCACCGAGTCGGTGCTTTTT
TT (SEQ ID NO: 838)
sgRNA B:
CAGGACGGTCACCTTTGGGGGTTTTAGAGCTAGAAATAGCAAGTTAAAAT
AAGGCTAGTCCGTTATCAACTTGAAAAAGTGGCACCGAGTCGGTGCTTTTT
TT (SEQ ID NO: 839)
sgRNA C:
GGTGACAAGTGTGATCACTTGTTTTAGAGCTAGAAATAGCAAGTTAAAAT
AAGGCTAGTCCGTTATCAACTTGAAAAAGTGGCACCGAGTCGGTGCTTTTT
TT (SEQ ID NO: 840)
sgRNA D:
CACACTTGTCACCACCCCAAGTTTTAGAGCTAGAAATAGCAAGTTAAAAT
AAGGCTAGTCCGTTATCAACTTGAAAAAGTGGCACCGAGTCGGTGCTTTTT
TT (SEQ ID NO: 841)

TABLE 10
Additional exemplary promoters for recording of mammalian pathways

| | | | Promoter sequence |
|---|---|---|---|
| | Triggering | | (mini-promoter sequence |
| pathway | molecule | concentration | indicated by italics) |
| NFκB | TNFα | 0.2-20 ng/mL | GGGACTTTCCGGGACTTTCCGGGGACTTTCCGGG |
| | | | ACTTTCCGGGGACTTTCCGGGACTTTCCAAGCTT |
| | | | AGACACTAGAGGGTATATAATGGAAGCTCGACT |
| | | | TCCAG (SEQ ID NO: 842) |
| CREB | foskolin | 5-100 μM | GCACCAGACAGTGACGTCAGCTGCCAGATCCCA |
| | | | TGGCCGTCATACTGTGACGTCTTTCAGACACCCC |
| | | | ATTGACGTCAATGGGAGAACAGATAAGCTTAGA |
| | | | CACTAGAGGGTATATAATGGAAGCTCGACTTCC |
| | | | AG (SEQ ID NO: 843) |
| SMAD | TGFβ | 10-25 ng/mL | AGCCAGACAAAGCCAGACAAAAGCCAGACAAA |
| | | | GCCAGACAAAAGCCAGACAAAGCCAGACAAAA |
| | | | GCCAGACAAAGCCAGACAAAAGCCAGACAAAG |
| | | | CCAGACAAAAGCCAGACAAAGCCAGACAAAAG |
| | | | CTTAGACACTAGAGGGTATATAATGGAAGCTCG |
| | | | ACTTCCAG (SEQ ID NO: 844) |
| C/EBP | LiC1 | 10-20 mM | ATTGCGCAATATTGCGCAATCATTGCGCAATATT |
| | | | GCGCAATCAAGCTTAGACACTAGAGGGTATATA |
| | | | ATGGAAGCTCGACTTCCAG (SEQ ID NO: 845) |
| SRF | PMA: 12- | 10 ng/mL | CAGGATGTCCATATTAGGACACAGGATGTCCAT |
| | myristate | | ATTAGGACACAGGATGTCCATATTAGGACACAG |
| | 13-acetate | | GATGTCCATATTAGGACACAGGATGTCCATATTA |
| | | | GGACACAGGATGTCCATATTAGGACAAAGCTTA |
| | | | GACACTAGAGGGTATATAATGGAAGCTCGACTT |
| | | | CCAG (SEQ ID NO: 846) |
| NFAT | PMA | 10 ng/mL | CGGAGGAAAAACTGTTTCATACAGAAGGCGTGG |
| | | | AGGAAAAACTGTTTCATACAGAAGGCGTGGAGG |
| | | | AAAAACTGTTTCATACAGAAGGCGTAGATCTAG |
| | | | ACTCTAGAGGGTATATAATGGAAGCTCGAATTC |
| | | | CAG (SEQ ID NO: 847) |
| GR | dexa- | 10 nM-1 μM | AGAACAAAATGTACCGGTACATTTTGTTCTAAGC |
| | methasone | | TTAGACACTAGAGGGTATATAATGGAAGCTCGA |
| | | | CTTCCAG (SEQ ID NO: 848) |
| XRE | TCDD: | 0.1-1 nM | TGAGTTCTCACGCTAGCAGATTGAGTTCTCACGC |
| | 2,3,7,8- | | TAGCAGATTGAGTTCTCACGCTAGCAGATTGAGT |
| | Tetra- | | TCTCACGCTAGCAGATTGAGTTCTCACGCTAGCA |
| | chlorodi- | | GATTGAGTTCTCACGCTAGCAGATAAGCTTAGAC |
| | benzodioxin | | ACTAGAGGGTATATAATGGAAGCTCGACTTCCAG |
| | | | (SEQ ID NO: 849) |
| MAPK/ | PMA | 0.5-10 ng/mL | CTGACTCAGCCTGAGTCAGCACTGACTCAGCCTG |
| Jnk | | | AGTCAGCACTGACTCAGCCTGAGTCAGCAAGCT |
| | | | TAGACACTAGAGGGTATATAATGGAAGCTCGAC |
| | | | TTCCAG (SEQ ID NO: 850) |
| IRF1 | interferon | 1-100 ng/mL | GGAAGCGAAAATGAAATTGACTGGAAGCGAAA |
| | γ | | ATGAAATTGACTGGAAGCGAAAATGAAATTGAC |
| | | | TGGAAGCGAAAATGAAATTGACTGGAAGCGAAA |
| | | | ATGAAATTGACTGGAAGCGAAAATGAAATTGAC |
| | | | TAAGCTTAGACACTAGAGGGTATATAATGGAAG |
| | | | CTCGACTTCCAG (SEQ ID NO: 851) |
| STAT1/ | interferon | 10-1000 U/mL | TAGTTTCACTTTCCCTAGTTTCACTTTCCCTAGTT |
| 2 | α | | TCACTTTCCCTAGTTTCACTTTCCCTAGTTTCACT |
| | | | TTCCCTAGTTTCACTTTCCCAAGCTTAGACACTA |
| | | | GAGGGTATATAATGGAAGCTCGACTTCCAG |
| | | | (SEQ ID NO: 852) |
| E2F | EGF | 1 μg/mL | TTTCGCGGGAAATTTCGCGGGAAATTTCGCGGG |
| | | | AAATTTCGCGGGAAATTTCGCGGGAAATTTCGC |
| | | | GGGAAAAAGCTTAGACACTAGAGGGTATATAAT |
| | | | GGAAGCTCGACTTCCAG (SEQ ID NO: 853) |
| HSF | 17-AAG | 1 μM | GAACGTTCCCGAAGAACGTTCCCGAAGAACGTT |
| | | | CCCGAAGAACGTTCCCGAAGAACGTTCCCGAAG |
| | | | AACGTTCCCGAAGAACGTTCCCGAAGAACGTTC |
| | | | CCGAAGAACGTTCCCGAAAAGCTTAGACACTAG |
| | | | AGGGTATATAATGGAAGCTCGACTTCCAG |
| | | | (SEQ ID NO: 854) |
| GATA | PMA | 10-100 ng/mL | GGCATTCTCTATCTGATTGTTGGCATTCTCTATCT |
| | | | GATTGTTGGCATTCTCTATCTGATTGTTGGCATTC |
| | | | TCTATCTGATTGTTGGCATTCTCTATCTGATTGTT |
| | | | GGCATTCTCTATCTGATTGTTAAGCTTAGACACT |
| | | | AGAGGGTATATAATGGAAGCTCGACTTCCAG |
| | | | (SEQ ID NO: 855) |
| ATF6 | tunicamycin | 200 ng/mL-2 | CTCGAGACAGGTGCTGACGTGGCATTCCTCGAG |
| | | μg/mL | ACAGGTGCTGACGTGGCATTCCTCGAGACAGGT |
| | | | GCTGACGTGGCATTCCTCGAGACAGGTGCTGAC |
| | | | GTGGCATTCCTCGAGACAGGTGCTGACGTGGCA |
| | | | TTCAAGCTTAGACACTAGAGGGTATATAATGGA |
| | | | AGCTCGACTTCCAG (SEQ ID NO: 856) |
| CBF/ | tunicamycin | 200 ng/mL-2 | CCTTCACCAATCGGCGGCCTCCACGACGGCCTTC |
| NF- | | μg/mL | ACCAATCGGCGGCCTCCACGACGGCCTTCACCA |
| Y/YY1 | | | ATCGGCGGCCTCCACGACGGCCTTCACCAATCG |
| | | | GCGGCCTCCACGACGGCCTTCACCAATCGGCGG |
| | | | CCTCCACGACGGAAGCTTAGACACTAGAGGGTA |
| | | | TATAATGGAAGCTCGACTTCCAG |
| | | | (SEQ ID NO: 857) |
| RAR | Tretinoin | 1-10 μM | AGGTCACCAGGAGGTCAAGGTCACCAGGAGGTC |
| | | | AAGGTCACCAGGAGGTCAAGGTCACCAGGAGGT |
| | | | CAAGGTCACCAGGAGGTCAAGGTCACCAGGAGG |
| | | | TCAAAGCTTAGACACTAGAGGGTATATAATGGA |
| | | | AGCTCGACTTCCAG (SEQ ID NO: 858) |
| RXR | Tretinoin | 1-10 μM | AGGTCACAGGTCACAGGTCACAGGTCACAGGTC |
| | | | ACAGGTCACAGGTCACAGGTCACAGGTCACAGG |
| | | | TCACAGGTCACAGGTCACAAGCTTAGACACTAG |
| | | | AGGGTATATAATGGAAGCTCGACTTCCAG |
| | | | (SEQ ID NO: 859) |
| VDR | calcitriol | 5-500 nM | GATCCACAAGGTTCACGAGGTTCACGTCCGGAT |
| | | | CCACAAGGTTCACGAGGTTCACGTCCGGATCCA |
| | | | CAAGGTTCACGAGGTTCACGTCCGGATCCACAA |
| | | | GGTTCACGAGGTTCACGTCCGAAGCTTAGACACT |
| | | | AGAGGGTATATAATGGAAGCTCGACTTCCAG |
| | | | (SEQ ID NO: 860) |
| ARE | D,L- | 10 μM | TAGCTTGGAAATGACATTGCTAATGGTGACAAA |
| | sulforaphane | | GCAACTTTTAGCTTGGAAATGACATTGCTAATGG |
| | | | TGACAAAGCAACTTTCTCGAGGATATCAAGATCT |
| | | | GGCCTCGGCGGCCAAGCTTAGACACTAGAGGGT |
| | | | ATATAATGGAAGCTCGACTTCCAG |
| | | | (SEQ ID NO: 861) |
| STAT3 | IL-6 | 5-150 ng/mL | GTCGACATTTCCCGTAAATCGTCGAGTCGACATT |
| | | | TCCCGTAAATCGTCGAGTCGACATTTCCCGTAAA |
| | | | TCGTCGAGTCGACATTTCCCGTAAATCGTCGAGT |
| | | | CGACATTTCCCGTAAATCGTCGAAAGCTTAGACA |
| | | | CTAGAGGGTATATAATGGAAGCTCGACTTCCAG |
| | | | (SEQ ID NO: 862) |

### EQUIVALENTS AND SCOPE

[0970] In the claims articles such as “a,” “an,” and “the” may mean one or more than one unless indicated to the contrary or otherwise evident from the context. Claims or descriptions that include “or” between one or more members of a group are considered satisfied if one, more than one, or all of the group members are present in, employed in, or otherwise relevant to a given product or process unless indicated to the contrary or otherwise evident from the context. The invention includes embodiments in which exactly one member of the group is present in, employed in, or otherwise relevant to a given product or process. The invention includes embodiments in which more than one, or all of the group members are present in, employed in, or otherwise relevant to a given product or process.

[0971] Furthermore, the invention encompasses all variations, combinations, and permutations in which one or more limitations, elements, clauses, and descriptive terms from one or more of the listed claims is introduced into another claim. For example, any claim that is dependent on another claim can be modified to include one or more limitations found in any other claim that is dependent on the same base claim. Where elements are presented as lists, e.g., in Markush group format, each subgroup of the elements is also disclosed, and any element(s) can be removed from the group. It should it be understood that, in general, where the invention, or aspects of the invention, is/are referred to as comprising particular elements and/or features, certain embodiments of the invention or aspects of the invention consist, or consist essentially of, such elements and/or features. For purposes of simplicity, those embodiments have not been specifically set forth in haec verba herein. It is also noted that the terms “comprising” and “containing” are intended to be open and permits the inclusion of additional elements or steps. Where ranges are given, endpoints are included. Furthermore, unless otherwise indicated or otherwise evident from the context and understanding of one of ordinary skill in the art, values that are expressed as ranges can assume any specific value or sub-range within the stated ranges in different embodiments of the invention, to the tenth of the unit of the lower limit of the range, unless the context clearly dictates otherwise.

[0972] This application refers to various issued patents, published patent applications, journal articles, and other publications, all of which are incorporated herein by reference. If there is a conflict between any of the incorporated references and the instant specification, the specification shall control. In addition, any particular embodiment of the present invention that falls within the prior art may be explicitly excluded from any one or more of the claims. Because such embodiments are deemed to be known to one of ordinary skill in the art, they may be excluded even if the exclusion is not set forth explicitly herein. Any particular embodiment of the invention can be excluded from any claim, for any reason, whether or not related to the existence of prior art.

[0973] Those skilled in the art will recognize or be able to ascertain using no more than routine experimentation many equivalents to the specific embodiments described herein. The scope of the present embodiments described herein is not intended to be limited to the above Description, but rather is as set forth in the appended claims. Those of ordinary skill in the art will appreciate that various changes and modifications to this description may be made without departing from the spirit or scope of the present invention, as defined in the following claims.

### REFERENCES

[0974] 1. J. Shendure, H. Ji, Next-generation DNA sequencing. Nat. Biotechnol. 26, 1135-1145 (2008).
[0975] 2. J. M. Heather, B. Chain, The sequence of sequencers: The history of sequencing DNA. Genomics 107, 1-8 (2016).
[0976] 3. O. Purcell, T. K. Lu, Synthetic analog and digital circuits for cellular computation and memory. Curr. Opin. Biotechnol. 29, 146-155 (2014).
[0977] 4. M. C. Inniss, P. A. Silver, Building synthetic memory. Curr. Biol. 23, R812-816 (2013).
[0978] 5. A. E. Friedland et al., Synthetic gene networks that count. Science 324, 1199-1202 (2009).
[0979] 6. J. Bonnet, P. Subsoontorn, D. Endy, Rewritable digital data storage in live cells via engineered control of recombination directionality. Proc. Natl. Acad. Sci. U.S.A 109, 8884-8889 (2012).
[0980] 7. L. Yang et al., Permanent genetic memory with >1-byte capacity. Nat. Methods 11, 1261-1266 (2014).
[0981] 8. F. Farzadfard, T. K. Lu, Synthetic biology. Genomically encoded analog memory with precise in vivo DNA writing in living cell populations. Science 346, 1256272 (2014).
[0982] 9. M. Jinek et al., A programmable dual-RNA-guided DNA endonuclease in adaptive bacterial immunity. Science 337, 816-821 (2012).
[0983] 10. J. A. Doudna, E. Charpentier, Genome editing. The new frontier of genome engineering with CRISPR-Cas9. Science 346, 1258096 (2014).
[0984] 11. L. Cong et al., Multiplex genome engineering using CRISPR/Cas systems. Science 339, 819-823 (2013).
[0985] 12. A. C. Komor, Y. B. Kim, M. S. Packer, J. A. Zuris, D. R. Liu, Programmable editing of a target base in genomic DNA without double-stranded DNA cleavage. Nature 533, 420-424 (2016).
[0986] 13. K. Nishida et al., Targeted nucleotide editing using hybrid prokaryotic and vertebrate adaptive immune systems. Science 353, (2016).
[0987] 14. L. A. Gilbert et al., CRISPR-mediated modular RNA-guided regulation of transcription in eukaryotes. Cell 154, 442-451 (2013).
[0988] 15. R. Bowater, A. J. Doherty, Making ends meet: repairing breaks in bacterial DNA by nonhomologous end-joining. PLoS Genet. 2, e8 (2006).
[0989] 16. S. Ayora et al., Double-strand break repair in bacteria: a view from Bacillus subtilis. FEMS Microbiol. Rev. 35, 1055-1081 (2011).
[0990] 17. J. C. Carlson, A. H. Badran, D. A. Guggiana-Nilo, D. R. Liu, Negative selection and stringency modulation in phage-assisted continuous evolution. Nat. Chem. Biol. 10, 216-222 (2014).
[0991] 18. V. Pattanayak et al., High-throughput profiling of off-target DNA cleavage reveals RNA-programmed Cas9 nuclease specificity. Nat. Biotechnol. 31, 839-843 (2013).
[0992] 19. G. L. Rosano, E. A. Ceccarelli, Recombinant protein expression in Escherichia coli: advances and challenges. Frontiers in microbiology 5, 172 (2014).
[0993] 20. A. Lewendon, I. A. Murray, W. V. Shaw, M. R. Gibbs, A. G. Leslie, Replacement of catalytic histidine-195 of chloramphenicol acetyltransferase: evidence for a general base role for glutamate. Biochemistry 33, 1944-1950 (1994).
[0994] 21. D. D. Boehr, P. R. Thompson, G. D. Wright, Molecular mechanism of aminoglycoside antibiotic kinase APH(3′)-IIIa: roles of conserved active site residues. J. Biol. Chem. 276, 23929-23936 (2001).
[0995] 22. Y. B. Kim et al., Increasing the genome-targeting scope and precision of base editing with engineered Cas9-cytidine deaminase fusions. Nat. Biotechnol. 35, 371-376 (2017).
[0996] 23. N. M. Gaudelli et al., Programmable base editing of A*T to G*C in genomic DNA without DNA cleavage. Nature 551, 464-471 (2017).
[0997] 24. A. C. Komor et al., Improved base excision repair inhibition and bacteriophage Mu Gam protein yields C·G-to-T·A base editors with higher efficiency and product purity. Science advances 3, eaao4774 (2017).
[0998] 25. L. Yang et al., Engineering and optimising deaminase fusions for genome editing. Nat. Commun. 7, 13330 (2016).
[0999] 26. H. A. Rees et al., Improving the DNA specificity and applicability of base editing through protein engineering and protein delivery. Nat. Commun. 8, 15790 (2017).
[1000] 27. K. Kim et al., Highly efficient RNA-guided base editing in mouse embryos. Nat. Biotechnol. 35, 435-437 (2017).
[1001] 28. C. Kuscu et al., CRISPR-STOP: gene silencing through base-editing-induced nonsense mutations. Nat. Methods 14, 710-712 (2017).
[1002] 29. Z. Shimatani et al., Targeted base editing in rice and tomato using a CRISPR-Cas9 cytidine deaminase fusion. Nat. Biotechnol. 35, 441-443 (2017).
[1003] 30. Y. Zong et al., Precise base editing in rice, wheat and maize with a Cas9-cytidine deaminase fusion. Nat. Biotechnol. 35, 438-440 (2017).
[1004] 31. W. Xiong, J. E. Ferrell, Jr., A positive-feedback-based bistable ‘memory module’ that governs a cell fate decision. Nature 426, 460-465 (2003).
[1005] 32. V. Hsiao, Y. Hori, P. W. Rothemund, R. M. Murray, A population-based temporal logic gate for timing and recording chemical events. Mol. Syst. Biol. 12, 869 (2016).
[1006] 33. L. Weiner, J. L. Brissette, P. Model, Stress-induced expression of the Escherichia coli phage shock protein operon is dependent on sigma 54 and modulated by positive and negative feedback mechanisms. Genes Dev. 5, 1912-1923 (1991).
[1007] 34. G. Rowley, M. Spector, J. Kormanec, M. Roberts, Pushing the envelope: extracytoplasmic stress responses in bacterial pathogens. Nat. Rev. Microbiol. 4, 383-394 (2006).
[1008] 35. B. P. Hubbard et al., Continuous directed evolution of DNA-binding proteins to improve TALEN specificity. Nat. Methods 12, 939-942 (2015).
[1009] 36. R. Ohlendorf, R. R. Vidavski, A. Eldar, K. Moffat, A. Moglich, From dusk till dawn: one-plasmid systems for light-regulated gene expression. J. Mol. Biol. 416, 534-542 (2012).
[1010] 37. M. Sadelain, E. P. Papapetrou, F. D. Bushman, Safe harbours for the integration of new DNA in the human genome. Nat. Rev. Cancer 12, 51-58 (2011).
[1011] 38. H. Clevers, R. Nusse, Wnt/beta-catenin signaling and disease. Cell 149, 1192-1205 (2012).
[1012] 39. V. Korinek et al., Constitutive transcriptional activation by a beta-catenin-Tcf complex in APC−/− colon carcinoma. Science 275, 1784-1787 (1997).
[1013] 40. C. M. Hedgepeth et al., Activation of the Wnt signaling pathway: a molecular mechanism for lithium action. Dev. Biol. 185, 82-91 (1997).
[1014] 41. K. L. Frieda et al., Synthetic recording and in situ readout of lineage information in single cells. Nature 541, 107-111 (2017).
[1015] 42. S. D. Perli, C. H. Cui, T. K. Lu, Continuous genetic recording with self-targeting CRISPR-Cas in human cells. Science 353, (2016). 43. S. Ringquist et al., Translation initiation in Escherichia coli: sequences within the ribosome-binding site. Mol. Microbiol. 6, 1219-1229 (1992).
[1016] 44. J. C. Carlson, A. H. Badran, D. A. Guggiana-Nilo, D. R. Liu, Negative selection and stringency modulation in phage-assisted continuous evolution. Nat. Chem. Biol. 10, 216-222 (2014).
[1017] 45. J. A. Zuris et al., Cationic lipid-mediated delivery of proteins enables efficient protein-based genome editing in vitro and in vivo. Nat. Biotechnol. 33, 73-80 (2015).
[1018] 46. S. D. Perli, C. H. Cui, T. K. Lu, Continuous genetic recording with self-targeting CRISPR-Cas in human cells. Science 353, (2016).
[1019] 47. V. Korinek et al., Constitutive transcriptional activation by a beta-catenin-Tcf complex in APC−/− colon carcinoma. Science 275, 1784-1787 (1997).

1-10. (canceled)

11. A cell data recorder system comprising:
(a) a writing plasmid comprising:
(i) a nucleic acid sequence encoding a fusion protein comprising a nucleic acid programmable DNA binding protein and a nucleic acid editing domain (a base editor) operably linked to a first promoter; and
(ii) a nucleic acid sequence encoding a sgRNA operably linked to a second promoter, wherein the sgRNA is complementary to a target sequence,
wherein at least one of the promoters is an inducible promoter, and wherein the sgRNA associates with the base editor under conditions that induce the expression of the base editor and expression of the sgRNA; and
(b) a recording plasmid comprising the target sequence.

12. The cell data recording system of claim 11, wherein the first promoter is a constitutive promoter.

13. The cell data recording system of claim 12, wherein the second promoter is a constitutive promoter.

14. The cell data recording system of claim 11, wherein the napDNAbp is a dCas9 domain or a Cas9n domain.

15. The cell data recording system of claim 14, wherein the dCas9 or Cas9n domain comprises a D10A and a H840A mutation in the amino acid sequence provided by SEQ ID NO: 10, or a corresponding mutation in any of the amino acid sequences provided in SEQ ID NOs: 11-260.

16. The cell data recording system of claim 11, wherein the nucleic acid editing domain comprises a deaminase, a nuclease, a nickase, a recombinase, a methyltransferase, a methylase, an acetylase, an acetyltransferase, a transcriptional activator, or a transcriptional repressor domain.

17. A cell comprising the cell data recording system of claim 11.

18. The cell of claim 17, wherein the cell is a prokaryotic cell.

19. The cell of claim 17, wherein the cell is a eukaryotic: cell.

20. A method for recording the presence and/or duration of a stimulus in a cell comprising detecting a change in the percentage of base editing in the target sequence in a cell of claim 17, wherein exposure to the stimulus results in expression of the sgRNA and expression of the base editor in the cell.

21. A cell data recorder system comprising:
(a) a writing plasmid comprising:
(i) a nucleic acid sequence encoding a fusion protein comprising a nucleic acid programmable DNA binding protein and a nucleic acid editing domain (a base editor) operably linked to a first promoter; and
(ii) a nucleic acid sequence encoding a sgRNA operably linked to a second promoter, wherein the sgRNA is complementary to a target sequence,
wherein at least one of the promoters is an inducible promoter, and wherein the sgRNA associates with the napDNAbp under conditions that induce the expression of the base editor and expression of the sgRNA; and
(b) a recording locus comprising the target sequence.

22. The cell data recording system of claim 21, wherein the first promoter is a constitutive promoter.

23. The cell data recording system of claim 22, wherein the second promoter is a constitutive promoter.

24. The cell data recording system of claim 21, wherein the napDNAbp is a dCas9 domain or a Cas9n domain.

25. The cell data recording system of claim 24, wherein the dCas9 or Cas9n domain comprises a D10A and a H840A mutation in the amino acid sequence provided by SEQ ID NO: 10, or a corresponding mutation in any of the amino acid sequences provided in SEQ ID NOs: 11-260.

26. The cell data recording system of claim 21, wherein the nucleic acid editing domain comprises a deaminase, a nuclease, a nickase, a recombinase, a methyltransferase, a methylase, an acetylase, an acetyltransferase, a transcriptional activator, or a transcriptional repressor domain.

27. The cell data recording system of claim 21, wherein the recording locus is a safe harbor locus.

28. A cell comprising the cell data recording system of claim 21.

29. The cell of claim 28, wherein the cell is a prokaryotic cell.

30. The cell of claim 28, wherein the cell is a eukaryotic cell.

31. A method for recording the presence of a stimulus in a cell comprising detecting base editing of the target sequence in the cell of claim 28, wherein exposure to the stimulus results in expression of the sgRNA and expression of the base editor in the cell.

The application's sequence listing, which the Patent Office published only in electronic form, follows.

SEQUENCE LISTING (866 sequences)

SEQ ID NO: 1 - DNA, 4104 bp, Streptococcus pyogenes
  source 1..4104: mol_type = genomic DNA
atggataagaaatactcaataggcttagatatcggcacaaatagcgtcggatgggcggtgatcactgatgattataaggttccgtctaaaaagttcaaggttctgggaaatacagaccgccacagtatcaaaaaaaatcttataggggctcttttatttggcagtggagagacagcggaagcgactcgtctcaaacggacagctcgtagaaggtatacacgtcggaagaatcgtatttgttatctacaggagattttttcaaatgagatggcgaaagtagatgatagtttctttcatcgacttgaagagtcttttttggtggaagaagacaagaagcatgaacgtcatcctatttttggaaatatagtagatgaagttgcttatcatgagaaatatccaactatctatcatctgcgaaaaaaattggcagattctactgataaagcggatttgcgcttaatctatttggccttagcgcatatgattaagtttcgtggtcattttttgattgagggagatttaaatcctgataatagtgatgtggacaaactatttatccagttggtacaaatctacaatcaattatttgaagaaaaccctattaacgcaagtagagtagatgctaaagcgattctttctgcacgattgagtaaatcaagacgattagaaaatctcattgctcagctccccggtgagaagagaaatggcttgtttgggaatctcattgctttgtcattgggattgacccctaattttaaatcaaattttgatttggcagaagatgctaaattacagctttcaaaagatacttacgatgatgatttagataatttattggcgcaaattggagatcaatatgctgatttgtttttggcagctaagaatttatcagatgctattttactttcagatatcctaagagtaaatagtgaaataactaaggctcccctatcagcttcaatgattaagcgctacgatgaacatcatcaagacttgactcttttaaaagctttagttcgacaacaacttccagaaaagtataaagaaatcttttttgatcaatcaaaaaacggatatgcaggttatattgatgggggagctagccaagaagaattttataaatttatcaaaccaattttagaaaaaatggatggtactgaggaattattggtgaaactaaatcgtgaagatttgctgcgcaagcaacggacctttgacaacggctctattccccatcaaattcacttgggtgagctgcatgctattttgagaagacaagaagacttttatccatttttaaaagacaatcgtgagaagattgaaaaaatcttgacttttcgaattccttattatgttggtccattggcgcgtggcaatagtcgttttgcatggatgactcggaagtctgaagaaacaattaccccatggaattttgaagaagttgtcgataaaggtgcttcagctcaatcatttattgaacgcatgacaaactttgataaaaatcttccaaatgaaaaagtactaccaaaacatagtttgctttatgagtattttacggtttataacgaattgacaaaggtcaaatatgttactgagggaatgcgaaaaccagcatttctttcaggtgaacagaagaaagccattgttgatttactcttcaaaacaaatcgaaaagtaaccgttaagcaattaaaagaagattatttcaaaaaaatagaatgttttgatagtgttgaaatttcaggagttgaagatagatttaatgcttcattaggcgcctaccatgatttgctaaaaattattaaagataaagattttttggataatgaagaaaatgaagatatcttagaggatattgttttaacattgaccttatttgaagatagggggatgattgaggaaagacttaaaacatatgctcacctctttgatgataaggtgatgaaacagcttaaacgtcgccgttatactggttggggacgtttgtctcgaaaattgattaatggtattagggataagcaatctggcaaaacaatattagattttttgaaatcagatggttttgccaatcgcaattttatgcagctgatccatgatgatagtttgacatttaaagaagatattcaaaaagcacaggtgtctggacaaggccatagtttacatgaacagattgctaacttagctggcagtcctgctattaaaaaaggtattttacagactgtaaaaattgttgatgaactggtcaaagtaatggggcataagccagaaaatatcgttattgaaatggcacgtgaaaatcagacaactcaaaagggccagaaaaattcgcgagagcgtatgaaacgaatcgaagaaggtatcaaagaattaggaagtcagattcttaaagagcatcctgttgaaaatactcaattgcaaaatgaaaagctctatctctattatctacaaaatggaagagacatgtatgtggaccaagaattagatattaatcgtttaagtgattatgatgtcgatcacattgttccacaaagtttcattaaagacgattcaatagacaataaggtactaacgcgttctgataaaaatcgtggtaaatcggataacgttccaagtgaagaagtagtcaaaaagatgaaaaactattggagacaacttctaaacgccaagttaatcactcaacgtaagtttgataatttaacgaaagctgaacgtggaggtttgagtgaacttgataaagctggttttatcaaacgccaattggttgaaactcgccaaatcactaagcatgtggcacaaattttggatagtcgcatgaatactaaatacgatgaaaatgataaacttattcgagaggttaaagtgattaccttaaaatctaaattagtttctgacttccgaaaagatttccaattctataaagtacgtgagattaacaattaccatcatgcccatgatgcgtatctaaatgccgtcgttggaactgctttgattaagaaatatccaaaacttgaatcggagtttgtctatggtgattataaagtttatgatgttcgtaaaatgattgctaagtctgagcaagaaataggcaaagcaaccgcaaaatatttcttttactctaatatcatgaacttcttcaaaacagaaattacacttgcaaatggagagattcgcaaacgccctctaatcgaaactaatggggaaactggagaaattgtctgggataaagggcgagattttgccacagtgcgcaaagtattgtccatgccccaagtcaatattgtcaagaaaacagaagtacagacaggcggattctccaaggagtcaattttaccaaaaagaaattcggacaagcttattgctcgtaaaaaagactgggatccaaaaaaatatggtggttttgatagtccaacggtagcttattcagtcctagtggttgctaaggtggaaaaagggaaatcgaagaagttaaaatccgttaaagagttactagggatcacaattatggaaagaagttcctttgaaaaaaatccgattgactttttagaagctaaaggatataaggaagttaaaaaagacttaatcattaaactacctaaatatagtctttttgagttagaaaacggtcgtaaacggatgctggctagtgccggagaattacaaaaaggaaatgagctggctctgccaagcaaatatgtgaattttttatatttagctagtcattatgaaaagttgaagggtagtccagaagataacgaacaaaaacaattgtttgtggagcagcataagcattatttagatgagattattgagcaaatcagtgaattttctaagcgtgttattttagcagatgccaatttagataaagttcttagtgcatataacaaacatagagacaaaccaatacgtgaacaagcagaaaatattattcatttatttacgttgacgaatcttggagctcccgctgcttttaaatattttgatacaacaattgatcgtaaacgatatacgtctacaaaagaagttttagatgccactcttatccatcaatccatcactggtctttatgaaacacgcattgatttgagtcagctaggaggtgactga

SEQ ID NO: 2 - protein, 1367 aa, Streptococcus pyogenes
MDKKYSIGLDIGTNSVGWAVITDDYKVPSKKFKVLGNTDRHSIKKNLIGALLFGSGETAEATRLKRTARRRYTRRKNRICYLQEIFSNEMAKVDDSFFHRLEESFLVEEDKKHERHPIFGNIVDEVAYHEKYPTIYHLRKKLADSTDKADLRLIYLALAHMIKFRGHFLIEGDLNPDNSDVDKLFIQLVQIYNQLFEENPINASRVDAKAILSARLSKSRRLENLIAQLPGEKRNGLFGNLIALSLGLTPNFKSNFDLAEDAKLQLSKDTYDDDLDNLLAQIGDQYADLFLAAKNLSDAILLSDILRVNSEITKAPLSASMIKRYDEHHQDLTLLKALVRQQLPEKYKEIFFDQSKNGYAGYIDGGASQEEFYKFIKPILEKMDGTEELLVKLNREDLLRKQRTFDNGSIPHQIHLGELHAILRRQEDFYPFLKDNREKIEKILTFRIPYYVGPLARGNSRFAWMTRKSEETITPWNFEEVVDKGASAQSFIERMTNFDKNLPNEKVLPKHSLLYEYFTVYNELTKVKYVTEGMRKPAFLSGEQKKAIVDLLFKTNRKVTVKQLKEDYFKKIECFDSVEISGVEDRFNASLGAYHDLLKIIKDKDFLDNEENEDILEDIVLTLTLFEDRGMIEERLKTYAHLFDDKVMKQLKRRRYTGWGRLSRKLINGIRDKQSGKTILDFLKSDGFANRNFMQLIHDDSLTFKEDIQKAQVSGQGHSLHEQIANLAGSPAIKKGILQTVKIVDELVKVMGHKPENIVIEMARENQTTQKGQKNSRERMKRIEEGIKELGSQILKEHPVENTQLQNEKLYLYYLQNGRDMYVDQELDINRLSDYDVDHIVPQSFIKDDSIDNKVLTRSDKNRGKSDNVPSEEVVKKMKNYWRQLLNAKLITQRKFDNLTKAERGGLSELDKAGFIKRQLVETRQITKHVAQILDSRMNTKYDENDKLIREVKVITLKSKLVSDFRKDFQFYKVREINNYHHAHDAYLNAVVGTALIKKYPKLESEFVYGDYKVYDVRKMIAKSEQEIGKATAKYFFYSNIMNFFKTEITLANGEIRKRPLIETNGETGEIVWDKGRDFATVRKVLSMPQVNIVKKTEVQTGGFSKESILPKRNSDKLIARKKDWDPKKYGGFDSPTVAYSVLVVAKVEKGKSKKLKSVKELLGITIMERSSFEKNPIDFLEAKGYKEVKKDLIIKLPKYSLFELENGRKRMLASAGELQKGNELALPSKYVNFLYLASHYEKLKGSPEDNEQKQLFVEQHKHYLDEIIEQISEFSKRVILADANLDKVLSAYNKHRDKPIREQAENIIHLFTLTNLGAPAAFKYFDTTIDRKRYTSTKEVLDATLIHQSITGLYETRIDLSQLGGD

SEQ ID NO: 3 - DNA, 4212 bp, unidentified
  source 1..4212: mol_type = unassigned DNA; note = Cas9 sequence
atggataaaaagtattctattggtttagacatcggcactaattccgttggatgggctgtcataaccgatgaatacaaagtaccttcaaagaaatttaaggtgttggggaacacagaccgtcattcgattaaaaagaatcttatcggtgccctcctattcgatagtggcgaaacggcagaggcgactcgcctgaaacgaaccgctcggagaaggtatacacgtcgcaagaaccgaatatgttacttacaagaaatttttagcaatgagatggccaaagttgacgattctttctttcaccgtttggaagagtccttccttgtcgaagaggacaagaaacatgaacggcaccccatctttggaaacatagtagatgaggtggcatatcatgaaaagtacccaacgatttatcacctcagaaaaaagctagttgactcaactgataaagcggacctgaggttaatctacttggctcttgcccatatgataaagttccgtgggcactttctcattgagggtgatctaaatccggacaactcggatgtcgacaaactgttcatccagttagtacaaacctataatcagttgtttgaagagaaccctataaatgcaagtggcgtggatgcgaaggctattcttagcgcccgcctctctaaatcccgacggctagaaaacctgatcgcacaattacccggagagaagaaaaatgggttgttcggtaaccttatagcgctctcactaggcctgacaccaaattttaagtcgaacttcgacttagctgaagatgccaaattgcagcttagtaaggacacgtacgatgacgatctcgacaatctactggcacaaattggagatcagtatgcggacttatttttggctgccaaaaaccttagcgatgcaatcctcctatctgacatactgagagttaatactgagattaccaaggcgccgttatccgcttcaatgatcaaaaggtacgatgaacatcaccaagacttgacacttctcaaggccctagtccgtcagcaactgcctgagaaatataaggaaatattctttgatcagtcgaaaaacgggtacgcaggttatattgacggcggagcgagtcaagaggaattctacaagtttatcaaacccatattagagaagatggatgggacggaagagttgcttgtaaaactcaatcgcgaagatctactgcgaaagcagcggactttcgacaacggtagcattccacatcaaatccacttaggcgaattgcatgctatacttagaaggcaggaggatttttatccgttcctcaaagacaatcgtgaaaagattgagaaaatcctaacctttcgcataccttactatgtgggacccctggcccgagggaactctcggttcgcatggatgacaagaaagtccgaagaaacgattactccatggaattttgaggaagttgtcgataaaggtgcgtcagctcaatcgttcatcgagaggatgaccaactttgacaagaatttaccgaacgaaaaagtattgcctaagcacagtttactttacgagtatttcacagtgtacaatgaactcacgaaagttaagtatgtcactgagggcatgcgtaaacccgcctttctaagcggagaacagaagaaagcaatagtagatctgttattcaagaccaaccgcaaagtgacagttaagcaattgaaagaggactactttaagaaaattgaatgcttcgattctgtcgagatctccggggtagaagatcgatttaatgcgtcacttggtacgtatcatgacctcctaaagataattaaagataaggacttcctggataacgaagagaatgaagatatcttagaagatatagtgttgactcttaccctctttgaagatcgggaaatgattgaggaaagactaaaaacatacgctcacctgttcgacgataaggttatgaaacagttaaagaggcgtcgctatacgggctggggacgattgtcgcggaaacttatcaacgggataagagacaagcaaagtggtaaaactattctcgattttctaaagagcgacggcttcgccaataggaactttatgcagctgatccatgatgactctttaaccttcaaagaggatatacaaaaggcacaggtttccggacaaggggactcattgcacgaacatattgcgaatcttgctggttcgccagccatcaaaaagggcatactccagacagtcaaagtagtggatgagctagttaaggtcatgggacgtcacaaaccggaaaacattgtaatcgagatggcacgcgaaaatcaaacgactcagaaggggcaaaaaaacagtcgagagcggatgaagagaatagaagagggtattaaagaactgggcagccagatcttaaaggagcatcctgtggaaaatacccaattgcagaacgagaaactttacctctattacctacaaaatggaagggacatgtatgttgatcaggaactggacataaaccgtttatctgattacgacgtcgatcacattgtaccccaatcctttttgaaggacgattcaatcgacaataaagtgcttacacgctcggataagaaccgagggaaaagtgacaatgttccaagcgaggaagtcgtaaagaaaatgaagaactattggcggcagctcctaaatgcgaaactgataacgcaaagaaagttcgataacttaactaaagctgagaggggtggcttgtctgaacttgacaaggccggatttattaaacgtcagctcgtggaaacccgccaaatcacaaagcatgttgcacagatactagattcccgaatgaatacgaaatacgacgagaacgataagctgattcgggaagtcaaagtaatcactttaaagtcaaaattggtgtcggacttcagaaaggattttcaattctataaagttagggagataaataactaccaccatgcgcacgacgcttatcttaatgccgtcgtagggaccgcactcattaagaaatacccgaagctagaaagtgagtttgtgtatggtgattacaaagtttatgacgtccgtaagatgatcgcgaaaagcgaacaggagataggcaaggctacagccaaatacttcttttattctaacattatgaatttctttaagacggaaatcactctggcaaacggagagatacgcaaacgacctttaattgaaaccaatggggagacaggtgaaatcgtatgggataagggccgggacttcgcgacggtgagaaaagttttgtccatgccccaagtcaacatagtaaagaaaactgaggtgcagaccggagggttttcaaaggaatcgattcttccaaaaaggaatagtgataagctcatcgctcgtaaaaaggactgggacccgaaaaagtacggtggcttcgatagccctacagttgcctattctgtcctagtagtggcaaaagttgagaagggaaaatccaagaaactgaagtcagtcaaagaattattggggataacgattatggagcgctcgtcttttgaaaagaaccccatcgacttccttgaggcgaaaggttacaaggaagtaaaaaaggatctcataattaaactaccaaagtatagtctgtttgagttagaaaatggccgaaaacggatgttggctagcgccggagagcttcaaaaggggaacgaactcgcactaccgtctaaatacgtgaatttcctgtatttagcgtcccattacgagaagttgaaaggttcacctgaagataacgaacagaagcaactttttgttgagcagcacaaacattatctcgacgaaatcatagagcaaatttcggaattcagtaagagagtcatcctagctgatgccaatctggacaaagtattaagcgcatacaacaagcacagggataaacccatacgtgagcaggcggaaaatattatccatttgtttactcttaccaacctcggcgctccagccgcattcaagtattttgacacaacgatagatcgcaaacgatacacttctaccaaggaggtgctagacgcgacactgattcaccaatccatcacgggattatatgaaactcggatagatttgtcacagcttgggggtgacggatcccccaagaagaagaggaaagtctcgagcgactacaaagaccatgacggtgattataaagatcatgacatcgattacaaggatgacgatgacaaggctgcagga

SEQ ID NO: 4 - protein, 1368 aa, unidentified
  source 1..1368: note = Cas9 sequence
MDKKYSIGLAIGTNSVGWAVITDEYKVPSKKFKVLGNTDRHSIKKNLIGALLFDSGETAEATRLKRTARRRYTRRKNRICYLQEIFSNEMAKVDDSFFHRLEESFLVEEDKKHERHPIFGNIVDEVAYHEKYPTIYHLRKKLVDSTDKADLRLIYLALAHMIKFRGHFLIEGDLNPDNSDVDKLFIQLVQTYNQLFEENPINASGVDAKAILSARLSKSRRLENLIAQLPGEKKNGLFGNLIALSLGLTPNFKSNFDLAEDAKLQLSKDTYDDDLDNLLAQIGDQYADLFLAAKNLSDAILLSDILRVNTEITKAPLSASMIKRYDEHHQDLTLLKALVRQQLPEKYKEIFFDQSKNGYAGYIDGGASQEEFYKFIKPILEKMDGTEELLVKLNREDLLRKQRTFDNGSIPHQIHLGELHAILRRQEDFYPFLKDNREKIEKILTFRIPYYVGPLARGNSRFAWMTRKSEETITPWNFEEVVDKGASAQSFIERMTNFDKNLPNEKVLPKHSLLYEYFTVYNELTKVKYVTEGMRKPAFLSGEQKKAIVDLLFKTNRKVTVKQLKEDYFKKIECFDSVEISGVEDRFNASLGTYHDLLKIIKDKDFLDNEENEDILEDIVLTLTLFEDREMIEERLKTYAHLFDDKVMKQLKRRRYTGWGRLSRKLINGIRDKQSGKTILDFLKSDGFANRNFMQLIHDDSLTFKEDIQKAQVSGQGDSLHEHIANLAGSPAIKKGILQTVKVVDELVKVMGRHKPENIVIEMARENQTTQKGQKNSRERMKRIEEGIKELGSQILKEHPVENTQLQNEKLYLYYLQNGRDMYVDQELDINRLSDYDVDHIVPQSFLKDDSIDNKVLTRSDKNRGKSDNVPSEEVVKKMKNYWRQLLNAKLITQRKFDNLTKAERGGLSELDKAGFIKRQLVETRQITKHVAQILDSRMNTKYDENDKLIREVKVITLKSKLVSDFRKDFQFYKVREINNYHHAHDAYLNAVVGTALIKKYPKLESEFVYGDYKVYDVRKMIAKSEQEIGKATAKYFFYSNIMNFFKTEITLANGEIRKRPLIETNGETGEIVWDKGRDFATVRKVLSMPQVNIVKKTEVQTGGFSKESILPKRNSDKLIARKKDWDPKKYGGFDSPTVAYSVLVVAKVEKGKSKKLKSVKELLGITIMERSSFEKNPIDFLEAKGYKEVKKDLIIKLPKYSLFELENGRKRMLASAGELQKGNELALPSKYVNFLYLASHYEKLKGSPEDNEQKQLFVEQHKHYLDEIIEQISEFSKRVILADANLDKVLSAYNKHRDKPIREQAENIIHLFTLTNLGAPAAFKYFDTTIDRKRYTSTKEVLDATLIHQSITGLYETRIDLSQLGGD

SEQ ID NO: 5 - DNA, 4107 bp, Streptococcus pyogenes
  source 1..4107: mol_type = genomic DNA
atggataagaaatactcaataggcttagatatcggcacaaatagcgtcggatgggcggtgatcactgatgaatataaggttccgtctaaaaagttcaaggttctgggaaatacagaccgccacagtatcaaaaaaaatcttataggggctcttttatttgacagtggagagacagcggaagcgactcgtctcaaacggacagctcgtagaaggtatacacgtcggaagaatcgtatttgttatctacaggagattttttcaaatgagatggcgaaagtagatgatagtttctttcatcgacttgaagagtcttttttggtggaagaagacaagaagcatgaacgtcatcctatttttggaaatatagtagatgaagttgcttatcatgagaaatatccaactatctatcatctgcgaaaaaaattggtagattctactgataaagcggatttgcgcttaatctatttggccttagcgcatatgattaagtttcgtggtcattttttgattgagggagatttaaatcctgataatagtgatgtggacaaactatttatccagttggtacaaacctacaatcaattatttgaagaaaaccctattaacgcaagtggagtagatgctaaagcgattctttctgcacgattgagtaaatcaagacgattagaaaatctcattgctcagctccccggtgagaagaaaaatggcttatttgggaatctcattgctttgtcattgggtttgacccctaattttaaatcaaattttgatttggcagaagatgctaaattacagctttcaaaagatacttacgatgatgatttagataatttattggcgcaaattggagatcaatatgctgatttgtttttggcagctaagaatttatcagatgctattttactttcagatatcctaagagtaaatactgaaataactaaggctcccctatcagcttcaatgattaaacgctacgatgaacatcatcaagacttgactcttttaaaagctttagttcgacaacaacttccagaaaagtataaagaaatcttttttgatcaatcaaaaaacggatatgcaggttatattgatgggggagctagccaagaagaattttataaatttatcaaaccaattttagaaaaaatggatggtactgaggaattattggtgaaactaaatcgtgaagatttgctgcgcaagcaacggacctttgacaacggctctattccccatcaaattcacttgggtgagctgcatgctattttgagaagacaagaagacttttatccatttttaaaagacaatcgtgagaagattgaaaaaatcttgacttttcgaattccttattatgttggtccattggcgcgtggcaatagtcgttttgcatggatgactcggaagtctgaagaaacaattaccccatggaattttgaagaagttgtcgataaaggtgcttcagctcaatcatttattgaacgcatgacaaactttgataaaaatcttccaaatgaaaaagtactaccaaaacatagtttgctttatgagtattttacggtttataacgaattgacaaaggtcaaatatgttactgaaggaatgcgaaaaccagcatttctttcaggtgaacagaagaaagccattgttgatttactcttcaaaacaaatcgaaaagtaaccgttaagcaattaaaagaagattatttcaaaaaaatagaatgttttgatagtgttgaaatttcaggagttgaagatagatttaatgcttcattaggtacctaccatgatttgctaaaaattattaaagataaagattttttggataatgaagaaaatgaagatatcttagaggatattgttttaacattgaccttatttgaagatagggagatgattgaggaaagacttaaaacatatgctcacctctttgatgataaggtgatgaaacagcttaaacgtcgccgttatactggttggggacgtttgtctcgaaaattgattaatggtattagggataagcaatctggcaaaacaatattagattttttgaaatcagatggttttgccaatcgcaattttatgcagctgatccatgatgatagtttgacatttaaagaagacattcaaaaagcacaagtgtctggacaaggcgatagtttacatgaacatattgcaaatttagctggtagccctgctattaaaaaaggtattttacagactgtaaaagttgttgatgaattggtcaaagtaatggggcggcataagccagaaaatatcgttattgaaatggcacgtgaaaatcagacaactcaaaagggccagaaaaattcgcgagagcgtatgaaacgaatcgaagaaggtatcaaagaattaggaagtcagattcttaaagagcatcctgttgaaaatactcaattgcaaaatgaaaagctctatctctattatctccaaaatggaagagacatgtatgtggaccaagaattagatattaatcgtttaagtgattatgatgtcgatcacattgttccacaaagtttccttaaagacgattcaatagacaataaggtcttaacgcgttctgataaaaatcgtggtaaatcggataacgttccaagtgaagaagtagtcaaaaagatgaaaaactattggagacaacttctaaacgccaagttaatcactcaacgtaagtttgataatttaacgaaagctgaacgtggaggtttgagtgaacttgataaagctggttttatcaaacgccaattggttgaaactcgccaaatcactaagcatgtggcacaaattttggatagtcgcatgaatactaaatacgatgaaaatgataaacttattcgagaggttaaagtgattaccttaaaatctaaattagtttctgacttccgaaaagatttccaattctataaagtacgtgagattaacaattaccatcatgcccatgatgcgtatctaaatgccgtcgttggaactgctttgattaagaaatatccaaaacttgaatcggagtttgtctatggtgattataaagtttatgatgttcgtaaaatgattgctaagtctgagcaagaaataggcaaagcaaccgcaaaatatttcttttactctaatatcatgaacttcttcaaaacagaaattacacttgcaaatggagagattcgcaaacgccctctaatcgaaactaatggggaaactggagaaattgtctgggataaagggcgagattttgccacagtgcgcaaagtattgtccatgccccaagtcaatattgtcaagaaaacagaagtacagacaggcggattctccaaggagtcaattttaccaaaaagaaattcggacaagcttattgctcgtaaaaaagactgggatccaaaaaaatatggtggttttgatagtccaacggtagcttattcagtcctagtggttgctaaggtggaaaaagggaaatcgaagaagttaaaatccgttaaagagttactagggatcacaattatggaaagaagttcctttgaaaaaaatccgattgactttttagaagctaaaggatataaggaagttaaaaaagacttaatcattaaactacctaaatatagtctttttgagttagaaaacggtcgtaaacggatgctggctagtgccggagaattacaaaaaggaaatgagctggctctgccaagcaaatatgtgaattttttatatttagctagtcattatgaaaagttgaagggtagtccagaagataacgaacaaaaacaattgtttgtggagcagcataagcattatttagatgagattattgagcaaatcagtgaattttctaagcgtgttattttagcagatgccaatttagataaagttcttagtgcatataacaaacatagagacaaaccaatacgtgaacaagcagaaaatattattcatttatttacgttgacgaatcttggagctcccgctgcttttaaatattttgatacaacaattgatcgtaaacgatatacgtctacaaaagaagttttagatgccactcttatccatcaatccatcactggtctttatgaaacacgcattgatttgagtcagctaggaggtgactga

SEQ ID NO: 6 - protein, 1368 aa, synthetic construct
MDKKYSIGLAIGTNSVGWAVITDEYKVPSKKFKVLGNTDRHSIKKNLIGALLFDSGETAEATRLKRTARRRYTRRKNRICYLQEIFSNEMAKVDDSFFHRLEESFLVEEDKKHERHPIFGNIVDEVAYHEKYPTIYHLRKKLVDSTDKADLRLIYLALAHMIKFRGHFLIEGDLNPDNSDVDKLFIQLVQTYNQLFEENPINASGVDAKAILSARLSKSRRLENLIAQLPGEKKNGLFGNLIALSLGLTPNFKSNFDLAEDAKLQLSKDTYDDDLDNLLAQIGDQYADLFLAAKNLSDAILLSDILRVNTEITKAPLSASMIKRYDEHHQDLTLLKALVRQQLPEKYKEIFFDQSKNGYAGYIDGGASQEEFYKFIKPILEKMDGTEELLVKLNREDLLRKQRTFDNGSIPHQIHLGELHAILRRQEDFYPFLKDNREKIEKILTFRIPYYVGPLARGNSRFAWMTRKSEETITPWNFEEVVDKGASAQSFIERMTNFDKNLPNEKVLPKHSLLYEYFTVYNELTKVKYVTEGMRKPAFLSGEQKKAIVDLLFKTNRKVTVKQLKEDYFKKIECFDSVEISGVEDRFNASLGTYHDLLKIIKDKDFLDNEENEDILEDIVLTLTLFEDREMIEERLKTYAHLFDDKVMKQLKRRRYTGWGRLSRKLINGIRDKQSGKTILDFLKSDGFANRNFMQLIHDDSLTFKEDIQKAQVSGQGDSLHEHIANLAGSPAIKKGILQTVKVVDELVKVMGRHKPENIVIEMARENQTTQKGQKNSRERMKRIEEGIKELGSQILKEHPVENTQLQNEKLYLYYLQNGRDMYVDQELDINRLSDYDVDAIVPQSFLKDDSIDNKVLTRSDKNRGKSDNVPSEEVVKKMKNYWRQLLNAKLITQRKFDNLTKAERGGLSELDKAGFIKRQLVETRQITKHVAQILDSRMNTKYDENDKLIREVKVITLKSKLVSDFRKDFQFYKVREINNYHHAHDAYLNAVVGTALIKKYPKLESEFVYGDYKVYDVRKMIAKSEQEIGKATAKYFFYSNIMNFFKTEITLANGEIRKRPLIETNGETGEIVWDKGRDFATVRKVLSMPQVNIVKKTEVQTGGFSKESILPKRNSDKLIARKKDWDPKKYGGFDSPTVAYSVLVVAKVEKGKSKKLKSVKELLGITIMERSSFEKNPIDFLEAKGYKEVKKDLIIKLPKYSLFELENGRKRMLASAGELQKGNELALPSKYVNFLYLASHYEKLKGSPEDNEQKQLFVEQHKHYLDEIIEQISEFSKRVILADANLDKVLSAYNKHRDKPIREQAENIIHLFTLTNLGAPAAFKYFDTTIDRKRYTSTKEVLDATLIHQSITGLYETRIDLSQLGGD

SEQ ID NO: 7 - protein, 1368 aa, synthetic construct; identical to SEQ ID NO: 4

SEQ ID NO: 8 - protein, 1368 aa, synthetic construct
MDKKYSIGLDIGTNSVGWAVITDEYKVPSKKFKVLGNTDRHSIKKNLIGALLFDSGETAEATRLKRTARRRYTRRKNRICYLQEIFSNEMAKVDDSFFHRLEESFLVEEDKKHERHPIFGNIVDEVAYHEKYPTIYHLRKKLVDSTDKADLRLIYLALAHMIKFRGHFLIEGDLNPDNSDVDKLFIQLVQTYNQLFEENPINASGVDAKAILSARLSKSRRLENLIAQLPGEKKNGLFGNLIALSLGLTPNFKSNFDLAEDAKLQLSKDTYDDDLDNLLAQIGDQYADLFLAAKNLSDAILLSDILRVNTEITKAPLSASMIKRYDEHHQDLTLLKALVRQQLPEKYKEIFFDQSKNGYAGYIDGGASQEEFYKFIKPILEKMDGTEELLVKLNREDLLRKQRTFDNGSIPHQIHLGELHAILRRQEDFYPFLKDNREKIEKILTFRIPYYVGPLARGNSRFAWMTRKSEETITPWNFEEVVDKGASAQSFIERMTNFDKNLPNEKVLPKHSLLYEYFTVYNELTKVKYVTEGMRKPAFLSGEQKKAIVDLLFKTNRKVTVKQLKEDYFKKIECFDSVEISGVEDRFNASLGTYHDLLKIIKDKDFLDNEENEDILEDIVLTLTLFEDREMIEERLKTYAHLFDDKVMKQLKRRRYTGWGRLSRKLINGIRDKQSGKTILDFLKSDGFANRNFMQLIHDDSLTFKEDIQKAQVSGQGDSLHEHIANLAGSPAIKKGILQTVKVVDELVKVMGRHKPENIVIEMARENQTTQKGQKNSRERMKRIEEGIKELGSQILKEHPVENTQLQNEKLYLYYLQNGRDMYVDQELDINRLSDYDVDAIVPQSFLKDDSIDNKVLTRSDKNRGKSDNVPSEEVVKKMKNYWRQLLNAKLITQRKFDNLTKAERGGLSELDKAGFIKRQLVETRQITKHVAQILDSRMNTKYDENDKLIREVKVITLKSKLVSDFRKDFQFYKVREINNYHHAHDAYLNAVVGTALIKKYPKLESEFVYGDYKVYDVRKMIAKSEQEIGKATAKYFFYSNIMNFFKTEITLANGEIRKRPLIETNGETGEIVWDKGRDFATVRKVLSMPQVNIVKKTEVQTGGFSKESILPKRNSDKLIARKKDWDPKKYGGFDSPTVAYSVLVVAKVEKGKSKKLKSVKELLGITIMERSSFEKNPIDFLEAKGYKEVKKDLIIKLPKYSLFELENGRKRMLASAGELQKGNELALPSKYVNFLYLASHYEKLKGSPEDNEQKQLFVEQHKHYLDEIIEQISEFSKRVILADANLDKVLSAYNKHRDKPIREQAENIIHLFTLTNLGAPAAFKYFDTTIDRKRYTSTKEVLDATLIHQSITGLYETRIDLSQLGGD

SEQ ID NO: 9 - protein, 1368 aa, synthetic construct; identical to SEQ ID NO: 6

SEQ ID NO: 10 - protein, 1368 aa, Streptococcus pyogenes [sequence omitted]

SEQ ID NO: 11 - protein, 1368 aa, Streptococcus pyogenes [sequence omitted]

SEQ ID NO: 12 - protein, 1372 aa, Streptococcus gallolyticus
MTKKNYSIGLDIGTNSVGWAVITDDYKVPAKKMKVLGNTDKKYIKKNLLGALLFDSGETAEATRLKRTARRRYTRRKNRLRYLQEIFANEIAKVDESFFQRLDESFLTDDDKTFDSHPIFGNKAEEDAYHQKFPTIYHLRKHLADSSEKADLRLVYLALAHMIKFRGHFLIEGELNAENTDVQKIFADFVGVYNRTFDDSHLSEITVDVASILTEKISKSRRLENLIKYYPTEKKNTLFGNLIALALGLQPNFKTNFKLSEDAKLQFSKDTYEEDLEELLGKIGDDYADLFTSAKNLYDAILLSGILTVDDNSTKAPLSASMIKRYVEHHEDLEKLKEFIKANKSELYHDIFKDKNKNGYAGYIENGVKQDEFYKYLKNILSKIKIDGSDYFLDKIEREDFLRKQRTFDNGSIPHQIHLQEMHAILRRQGDYYPFLKEKQDRIEKILTFRIPYYVGPLVRKDSRFAWAEYRSDEKITPWNFDKVIDKEKSAEKFITRMTLNDLYLPEEKVLPKHSHVYETYAVYNELTKIKYVNEQGKESFFDSNMKQEIFDHVFKENRKVTKEKLLNYLNKEFPEYRIKDLIGLDKENKSFNASLGTYHDLKKILDKAFLDDKVNEEVIEDIIKTLTLFEDKDMIHERLQKYSDIFTANQLKKLERRHYTGWGRLSYKLINGIRNKENNKTILDYLIDDGSANRNFMQLINDDTLPFKQIIQKSQVVGDVDDIEAVVHDLPGSPAIKKGILQSVKIVDELVKVMGGNPDNIVIEMARENQTTNRGRSQSQQRLKKLQNSLKELGSNILNEEKPSYIEDKVENSHLQNDQLFLYYIQNGKDMYTGDELDIDHLSDYDIDHIIPQAFIKDDSIDNRVLTSSAKNRGKSDDVPSLDIVRARKAEWVRLYKSGLISKRKFDNLTKAERGGLTEADKAGFIKRQLVETRQITKHVAQILDARFNTEHDENDKVIRDVKVITLKSNLVSQFRKDFEFYKVREINDYHHAHDAYLNAVVGTALLKKYPKLASEFVYGEYKKYDIRKFITNSSDKATAKYFFYSNLMNFFKTKVKYADGTVFERPIIETNADGEIAWNKQIDFEKVRKVLSYPQVNIVKKVETQTGGFSKESILPKGDSDKLIPRKTKKVYWDTKKYGGFDSPTVAYSVFVVADVEKGKAKKLKTVKELVGISIMERSFFEENPVEFLENKGYHNIREDKLIKLPKYSLFEFEGGRRRLLASASELQKGNEMVLPGYLVELLYHAHRADNFNSTEYLNYVSEHKKEFEKVLSCVEDFANLYVDVEKNLSKIRAVADSMDNFSIEEISNSFINLLTLTALGAPADFNFLGEKIPRKRYTSTKECLNATLIHQSITGLYETRIDLSKLGEE

SEQ ID NO: 13 - protein, 1370 aa, Streptococcus gordonii
MKKGYSIGLDIGTNSVGFAVITDDYKVPSKKMKVLGNTDKRFIKKNLIGALLFDEGTTAEARRLKRTARRRYTRRKNRLRYLQEIFSEEMSKVDSSFFHRLDDSFLIPEDKRESKYPIFATLTEEKEYHKQFPTIYHLRKQLADSKEKTDLRLIYLALAHMIKYRGHFLYEEAFDIKNNDIQKIFNEFISIYDNTFEGSSLSGQNAQVEAIFTDKISKSAKRERVLKLFPDEKSTGLFSEFLKLIVGNQADFKKHFDLEDKAPLQFSKDTYDEDLENLLGQIGDDFTDLFVSAKKLYDAILLSGILTVTDPSTKAPLSASMIERYENHQNDLAALKQFIKNNLPEKYDEVFSDQSKDGYAGYIDGKTTQETFYKYIKNLLSKFEGTDYFLDKIEREDFLRKQRTFDNGSIPHQIHLQEMNAILRRQGEYYPFLKDNKEKIEKILTFRIPYYVGPLARGNRDFAWLTRNSDEAIRPWNFEEIVDKASSAEDFINKMTNYDLYLPEEKVLPKHSLLYETFAVYNELTKVKFIAEGLRDYQFLDSGQKKQIVNQLFKENRKVTEKDIIHYLHNVDGYDGIELKGIEKQFNASLSTYHDLLKIIKDKEFMDDAKNEAILENIVHTLTIFEDREMIKQRLAQYDSLFDEKVIKALTRRHYTGWGKLSAKLINGICDKQTGNTILDYLIDDGKINRNFMQLINDDGLSFKEIIQKAQVIGKTDDVKQVVQELSGSPAIKKGILQSIKIVDELVKVMGHAPESIVIEMARENQTTARGKKNSQQRYKRIEDSLKILASGLDSNILKENPTDNNQLQNDRLFLYYLQNGKDMYTGEALDINQLSSYDIDHIIPQAFIKDDSLDNRVLTSSKDNRGKSDNVPSIEVVQKRKAFWQQLLDSKLISERKFNNLTKAERGGLDERDKVGFIKRQLVETRQITKHVAQILDARYNTEVNEKDKKNRTVKIITLKSNLVSNFRKEFRLYKVREINDYHHAHDAYLNAVVAKAILKKYPKLEPEFVYGEYQKYDLKRYISRSKDPKEVEKATEKYFFYSNLLNFFKEEVHYADGTIVKRENIEYSKDTGEIAWNKEKDFAIIKKVLSLPQVNIVKKREVQTGGFSKESILPKGNSDKLIPRKTKDILLDTTKYGGFDSPVIAYSILLIADIEKGKAKKLKTVKTLVGITIMEKAAFEENPITFLENKGYHNVRKENILCLPKYSLFELENGRRRLLASAKELQKGNEIVLPVYLTTLLYHSKNVHKLDEPGHLEYIQKHRNEFKDLLNLVSEFSQKYVLADANLEKIKSLYADNEQADIEILANSFINLLTFTALGAPAAFKFFGKDIDRKRYTTVSEILNATLIHQSITGLYETWIDLSKLGED

SEQ ID NO: 14 - protein, 1056 aa, Staphylococcus aureus
GSHMKRNYILGLDIGITSVGYGIIDYETRDVIDAGVRLFKEANVENNEGRRSKRGARRLKRRRRHRIQRVKKLLFDYNLLTDHSELSGINPYEARVKGLSQKLSEEEFSAALLHLAKRRGVHNVNEVEEDTGNELSTKEQISRNSKALEEKYVAELQLERLKKDGEVRGSINRFKTSDYVKEAKQLLKVQKAYHQLDQSFIDTYIDLLETRRTYYEGPGEGSPFGWKDIKEWYEMLMGHCTYFPEELRSVKYAYNADLYNALNDLNNLVITRDENEKLEYYEKFQIIENVFKQKKKPTLKQIAKEILVNEEDIKGYRVTSTGKPEFTNLKVYHDIKDITARKEIIENAELLDQIAKILTIYQSSEDIQEELTNLNSELTQEEIEQISNLKGYTGTHNLSLKAINLILDELWHTNDNQIAIFNRLKLVPKKVDLSQQKEIPTTLVDDFILSPVVKRSFIQSIKVINAIIKKYGLPNDIIIELAREKNSKDAQKMINEMQKRNRQTNERIEEIIRTTGKENAKYLIEKIKLHDMQEGKCLYSLEAIPLEDLLNNPFNYEVDHIIPRSVSFDNSFNNKVLVKQEEASKKGNRTPFQYLSSSDSKISYETFKKHILNLAKGKGRISKTKKEYLLEERDINRFSVQKDFINRNLVDTRYATRGLMNLLRSYFRVNNLDVKVKSINGGFTSFLRRKWKFKKERNKGYKHHAEDALIIANADFIFKEWKKLDKAKKVMENQMFEEKQAESMPEIETEQEYKEIFITPHQIKHIKDFKDYKYSHRVDKKPNRELINDTLYSTRKDDKGNTLIVNNLNGLYDKDNDKLKKLINKSPEKLLMYHHDPQTYQKLKLIMEQYGDEKNPLYKYYEETGNYLTKYSKKDNGPVIKKIKYYGNKLNAHLDITDDYPNSRNKVVKLSLKPYRFDVYLDNGVYKFVTVKNLDVIKKENYYEVNSKAYEEAKKLKKISNQAEFIASFYNNDLIKINGELYRVIGVNNDLLNRIEVNMIDITYREYLENMNDKRPPRIIKTIASKTQSIKKYSTDILGNLYEVKSKKHPQIIKKG

SEQ ID NO: 15 - protein, 1052 aa, Streptococcus pyogenes
LSASMIKRYDEHHQDLTLLKALVRQQLPEKYKEIFFDQSKNGYAGYIDGGASQEEFYKFIKPILEKMDGTEELLAKLNREDLLRKQRTFDNGSIPHQIHLGELHAILRRQEDFYPFLKDNREKIEKILTFRIPYYVGPLARGNSRFAWMTRKSEETITPWNFEEVVDKGASAQSFIERMTNFDKNLPNEKVLPKHSLLYEYFTVYNELTKVKYVTEGMRKPAFLSGEQKKAIVDLLFKTNRKVTVKQLKEDYFKKIECFDSVEISGVEDRFNASLGTYHDLLKIIKDKDFLDNEENEDILEDIVLTLTLFEDREMIEERLKTYAHLFDDKVMKQLKRRRYTGWGRLSRKLINGIRDKQSGKTILDFLKSDGFANRNFMQLIHDDSLTFKEDLQKAQVSGQGDSLHEHIANLAGSPAIKKGILQTVKVVDELVKVMGRHKPENIVIEMARENQTTQKGQKNSRERMKRIEEGIKELGSDILKEYPVENTQLQNEKLYLYYLQNGRDMYVDQELDINRLSDYDVDHIVPQSFLKDDSIDNKVLTRSDKNRGKSDNVPSEEVVKKMKNYWKQLLNAKLITQRKFDNLTKAERGGLSELDKAGFIKRQLVETRQITKHVAQILDSRMNTKYDENDKLIREVRVITLKSKLVSDFRKDFQFYKVREINNYHHAHDAYLNAVVGTALIKKYPKLESEFVYGDYKVYDIRKMIAKSEQEIGKATAKYFFYSNIMNFFKTEITLANGEIRKRPLIETNGETGEIVWDKGRDFATVRKVLSMPQVNIVKKTEVQTGGFSKESILPKRNSDKLIARKKDWDPKKYGGFDSPTVAYSVLVVAKVEKGKSKKLKSVKELVGITIMERSSFEKDPVDFLEAKGYKEVRKDLIIKLPKYSLFELENGRKRMLASAGELQKGNELALPSKYVNFLYLASHYEKLKGSPEDNEQKQLFVEQHKHYLDEIIEQISEFSKRVILADANLDKVLSAYNKHRDKPIREQAENIIHLFTLTNLGAPAAFKCFDTTIGRNRYKSIKEVLDATLIHQSITGLYETRIDLSQLGGD

SEQ ID NO: 16 - protein, 1368 aa, Streptococcus pyogenes [sequence omitted]

SEQ ID NO: 17 - protein, 1368 aa, Streptococcus pyogenes
MDKKYSIGLDIGTNSVGWAVITDDYKVPSKKLKGLGNTDRHGIKKNLIGALLFDSGETAEATRLKRTARRRYTRRKNRICYLQEIFSNEMAKVDDSFFHRLEESFLVEEDKKHERHPIFGNIVDEVAYHEKYPTIYHLRKKLADSTDKVDLRLIYLALAHMIKFRGHFLIEGDLNPDNSDVDKLFIQLVQTYNQLFEENPINASRVDAKAILSARLSKSRRLENLIAQLPGEKKNGLFGNLIALSLGLTPNFKSNFDLAEDAKLQLSKDTYDDDLDNLLAQIGDQYADLFLAAKNLSDATLLSDILRVNSEITKAPLSASMIKRYDEHHQDLTLLKALVRQQLPEKYKEIFFDQSKNGYAGYIDGGASQEEFYKFIKPILEKMDGTEELLAKLNREDLLRKQRTFDNGSIPYQIHLGELHAILRRQEDFYPFLKDNREKIEKILTFRIPYYVGPLARGNSRFAWMTRKSEETITPWNFEEVVDKGASAQSFIERMTNFDKNLPNEKVLPKHSLLYEYFTVYNELTKVKYVTEGMRKPAFLSGEQKKAIVDLLFKTNRKVTVKQLKEDYFKKIECFDSVEISGVEDRFNASLGTYHDLLKIIKDKDFLDNEENEDILEDIVLTLTLFEDREMIEERLKTYAHLFDDKVMKQLKRRRYTGWGRLSRKLINGIRDKQSGKTILDFLKSDGFANRNFMQLIHDDSLTFKEDIQKAQVSGQGDSLHEHIANLAGSPAIKKGILQTVKVVDELVKVMGRHKPENIVIEMARENQTTQKGQKNSRERMKRIEEGIKELGSDILKEYPVENTQLQNEKLYLYYLQNGRDMYVDQELDINRLSDYDVDHIVPQSFLKDDSIDNKVLTRSDKNRGKSDNVPSEEVVKKMKNYWRQLLNAKLITQRKFDNLTKAERGGLSELDKVGFIKRQLVETRQITKHVAQILDSRMNTKYDENDKLIREVRVITLKSKLVSDFRKDFQFYKVREINNYHHAHDAYLNAVVGTALIKKYPKLESEFVYGDYKVYDVRKMIAKSEQEIGKATAKYFFYSNIMNFFKTEITLANGEIRKRPLIETNGETGEIVWDKGRDFATVRKVLSMPQVNIVKKTEVQTGGFSKESILPKRNSDKLIARKKDWDPKKYGGFDSPTVAYSVLVVAKVEKGKSKKLKSVKELLGITIMERSSFEKDPIDFLEAKGYKEVRKDLIIKLPKYSLFELENGRKRMLASAGELQKGNELALPSKYVNFLYLASHYEKLKGSPEDNEQKQLFVEQHKHYLDEIIEQISEFSKRVILADANLDKVLSAYNKHRDKPIREQAENIIHLFTLTNLGAPAAFKYFDTTIDRKRYTSTKEVLDATLIHQSITGLYETRIDLSQLGGD

SEQ ID NO: 18 - protein, 1368 aa, Streptococcus pyogenes
MDKKYSIGLDIGTNSVGWAVITDDYKVPSKKFKVLGNTDRHSIKKNLIGALLFDSGETAEATRLKRTARRRYTRRKNRICYLQEIFSNEMAKVDDSFFHRLEESFLVEEDKKHERHPIFGNIVDEVAYHEKYPTIYHLRKKLVDSTDKADLRLIYLALAHMIKFRGHFLIEGDLNPDNSDVDKLFIQLVQTYNQLFEENPINASGVDAKAILSARLSKSRRLENLIAQLPGEKKNGLFGNLIALSLGLTPNFKSNFDLAEDAKLQLSKDTYDDDLDNLLAQIGDQYADLFLAAKNLSDAILLSDILRLNSEITKAPLSASMIKRYDEHHQDLTLLKALVRQQLPEKYKEIFFDQSKNGYAGYIDGGASQEEFYKFIKPILEKMDGTEELLAKLNREDLLRKQRTFDNGSIPHQIHLGELHAILRRQEDFYPFLKDNREKIEKILTFRIPYYVGPLARGNSRFAWMTRKSEETITPWNFEEVVDKGASAQSFIERMTNFDKNLPNEKVLPKHSLLYEYFTVYNELTKVKYVTEGMRKPAFLSGEQKKAIVDLLFKTNRKVTVKQLKEDYFKKIECFDSVEISGVEDRFNASLGTYHDLLKIIKDKDFLDNEENEDILEDIVLTLTLFEDREMIEERLKTYAHLFDDKVMKQLKRRRYTGWGRLSRKLINGIRDKQSGKTILDFLKSDGFANRNFMQLIHDDSLTFKEDIQKAQVSGQGDSLHEHIANLAGSPAIKKGILQTVKVVDELVKVMGRHKPENIVIEMARENQTTQKGQKNSRERMKRIEEGIKELGSQILKEHPVENTQLQNEKLYLYYLQNGRDMYVDQELDINRLSDYDVDHIVPQSFIKDDSIDNKVLTRSDKNRGKSNNVPSEEVVKKMKNYWRQLLNAKLITQRKFDNLTKAERGGLSELDKAGFIKRQLVETRQITKHVAQILDSRMNTKYDENDKLIREVKVITLKSKLVSDFRKDFQFYKVREINNYHHAHDAYLNAVVGTALIKKYPKLESEFVYGDYKVYDVRKMIAKSEQEIGKATAKYFFYSNIMNFFKTEITLANGEIRKRPLIETNGETGEIVWDKGRDFATVRKVLSMPQVNIVKKTEVQTGGFSKESILPKRNSDKLIARKKDWDPKKYGGFDSPTVAYSVLVVAKVEKGKSKKLKSVKELLGITIMERSSFEKNPIDFLEAKGYKEVRKDLIVKLPKYSLFELENGRKRMLASAGELQKGNELALPSKYVNFLYLASHYEKLKGSPEDNEQKQLFVEQHKHYLDEIIEQISEFSKRVILADANLDKVLSAYNKHRDKPIREQAENIIHLFTLTNLGAPAAFKYFDTTIDRKRYTSTKEVLDATFIHQSITGLYETRIDLSQLGGD

SEQ ID NO: 19 - protein, 1368 aa, Streptococcus pyogenes
MDKKYSIGLDIGTNSVGWAVITDDYKVPSKKFKVLGNTDRHSIKKNLIGALLFDSGETAEATRLKRTARRRYTRRKNRICYLQEIFSNEMAKVDDSFFHRLEESFLVEEDKKHERHPIFGNIVDEVAYHEKYPTIYHLRKKLVDSTDKADLRLIYLALAHMIKFRGHFLIEGDLNPDNSDVDKLFIQLVQTYNQLFEENPINASGVDAKAILSARLSKSRRLENLIAQLPGEKKNGLFGNLIALSLGLTPNFKSNFDLAEDAKLQLSKDTYDDDLDNLLAQIGDQYADLFLAAKNLSDAILLSDILRVNTEITKAPLSASMIKRYDEHHQDLTLLKALVRQQLPEKYKEIFFDQSKNGYAGYIDGGASQEEFYKFIKPILEKMDGTEELLVKLNREDLLRKQRTFDNGSIPHQIHLGELHAILRRQEDFYPFLKDNREKIEKILTFRIPYYVGPLARGNSRFAWMTRKSEETITPWNFEEVVDKGASAQSFIERMTNFDKNLPNEKVLPKHSLLYEYFTVYNELTKVKYVTEGMRKPAFLSGEQKKAIVDLLFKTNRKVTVKQLKEDYFKKIECFDSVEISGVEDRFNASLGTYHDLLKIIKDKDFLDNEENEDILEDIVLTLTLFEDREMIEERLKTYAHLFDDKVMKQLKRRRYTGWGRLSRKLINGIRDKQSGKTILDFLKSDGFANRNFMQLIHDDSLTFKEDIQKAQVSGQGDSLHEHIANLAGSPAIKKGILQTVKVVDELVKVMGRHKPENIVIEMARENQTTQKGQKNSRERMKRIEEGIKELGSQILKEHPVENTQLQNEKLYLYYLQNGRDMYVDQELDINRLSDYDVDHIVPQSFLKDDSIDNKVLTRSDKNRGKSDNVPSEEVVKKMKNYWRQLLNAKLITQRKFDNLTKAERGGLSELDKAGFIKRQLVETRQITKHVAQILDSRMNTKYDENDKLIREVKVITLKSKLVSDFRKDFQFYKVREINNYHHAHDAYLNAVVGTALIKKYPKLESEFVYGDYKVYDVRKMIAKSEQEIGKATAKYFFYSNIMNFFKTEITLANGEIRKRPLIETNGETGEIVWDKGRDFATVRKVLSMPQVNIVKKTEVQTGGFSKESILPKRNSDKLIARKKDWDPKKYGGFDSPTVAYSVLVVAKVEKGKSKKLKSVKELLGITIMERSSFEKNPIDFLEAKGYKEVKKDLIIKLPKYSLFELENGRKRMLASAGELQKGNELALPSKYVNFLYLASHYEKLKGSPEDNEQKQLFVEQHKHYLDEIIEQISEFSKRVILADANLDKVLSAYNKHRDKPIREQAENIIHLFTLTNLGAPAAFKYFDTTIDRKRYTSTKEVLDATLIHQSITGLYETRIDLSQLGGD

SEQ ID NO: 20 - protein, 1368 aa, Streptococcus pyogenes
MDKKYSIGLDIGTNSVGWAVITDDYKVPSKKFKVLGNTDRHSIKKNLIGALLFDSGEIAEATRLKRTARRRYTRRKNRICYLQEIFSNEMAKVDDSFFHRLEESFLVEEDKKHERHPIFGNIVDEVAYHEKYPTIYHLRKKLVDSTDKADLRLIYLALAHMIKFRGHFLIEGDLNPDNSDVDKLFIQLVQTYNQLFEENPINASGVDAKAILSARLSKSRRLENLIAQLPGEKKNGLFGNLIALSLGLTPNFKSNFDLAEDAKLQLSKDTYDDDLDNLLAQIGDQYADLFLAAKNLSDAILLSDILRLNSEITKAPLSASMIKRYDEHHQDLTLLKALVRQQLPEKYKEIFFDQSKNGYAGYIDGGASQEEFYKFIKPILEKMDGTEELLAKLNREDLLRKQRTFDNGSIPHQIHLGELHAILRRQEDFYPFLKDNREKIEKILTFRIPYYVGPLARGNSRFAWMTRKSEETITPWNFEEVVDKGASAQSFIERMTNFDKNLPNEKVLPKHSLLYEYFTVYNELTKVKYVTEGMRKPAFLSGEQKKAIVDLLFKTNRKVTVKQLKEDYFKKIECFDSVEISGVEDRFNASLGTYHDLLKIIKDKDFLDNEENEDILEDIVLTLTLFEDREMIEERLKTYAHLFDDKVMKQLKRRRYTVWGRLSRKLINGIRDKQSGKTILDFLKSDGFANRNFMQLIHDDSLTFKEDIQKAQVSGQGDSLHEHIANLAGSPAIKKGILQTVKVVDELVKVMGRHKPENIVIEMARENQTTQKGQKNSRERMKRIEEGIKELGSQILKEHPVENTQLQNEKLYLYYLQNGRDMYVDQELDINRLSDYDVDHIVPQSFIKDDSIDNKVLTRSDKNRGKSDNVPSEEVVKKMKNYWRQLLNAKLITQRKFDNLTKAERGGLSELDKAGFIKRQLVETRQITKHVAQILDSRMNTKYDENDKLIREVKVITLKSKLVSDFRKDFQFYKVREINNYHHAHDAYLNAVVGTALIKKYPKLESEFVYGDYKVYDVRKMLAKSEQEIGKATAKYFFYSNIMNFFKTEITLANGEIRKRPLIETNGETGEIVWDKGRDFATVRKVLSMPQVNIVKKTEVQTGGFSKESILPKRNSDKLIARKKDWDPKKYGGFDSPTVAYSVLVVAKVEKGKSKKLKSVKELLGITIMERSSFEKNPIDFLEAKGYKEVRKDLIIKLPKYSLFELENGRKRMLASAGELQKGNELALPSKYVNFLYLASHYEKLKGSPEDNEQKQLFVEQHKHYLDEIIEQISEFSKRVILADANLDKVLSAYNKHRDKPIREQAENIIHLFTLTNLGAPTAFKYFDTTIDRKRYTSTKEVLDATFIHQSITGLYETRIDLSQLGGD

SEQ ID NO: 21 - protein, 1368 aa, Streptococcus pyogenes
MDKKYSIGLDIGTNSVGWAVITDDYKVPSKKFKVLGNTDRHSIKKNLIGALLFDSGETAEATRLKRTARRRYTRRKNRICYLQEIFSNEIAKVDDSFFHRLEESFLVEEDKKHERHPIFGNIVDEVAYHEKYPTIYHLRKKLADSTDKADLRLIYLALAHMIKFRGHFLIEGDLNPDNSDVDKLFIQLVQTYNQLFEENPINASRVDAKAILSARLSKSRRLENLIAQLPGEKRNGLFGNLIALSLGLTPNFKSNFDLAEDAKLQLSKDTYDDDLDNLLAQIGDQYADLFLAAKNLSDAILLSDILRVNTEITKAPLSASMIKRYDEHHQDLTLLKALVRQQLPEKYKEIFFDQSKNGYAGYIDGGASQEEFYKFIKPILEKMDGTEELLAKLNREDLLRKQRTFDNGSIPHQIHLGELHAILRRQEDFYPFLKDNREKIEKILTFRIPYYVGPLARGNSRFAWMTRKSEETITPWNFEEVVDKGASAQSFIERMTNFDKNLPNEKVLPKHSLLYEYFTVYNELTKVKYVTEGMRKPAFLSGEQKKAIVDLLFKTNRKVTVKQLKEDYFKKIECFDSVEISGVEDRFNASLGTYHDLLKIIKDKDFLDNEENEDILEDIVLTLTLFEDREMIEERLKTYAHLFDDKVMKQLKRRRYTGWGRLSRKLINGIRDKQSGKTILDFLKSDGFANRNFMQLIHDDSLTFKEDLQKAQVSGQGDSLHEHIANLAGSPAIKKGILQTVKVVDELVKVMGRHKPENIVIEMARENQTTQKGQKNSRERMKRIEEGIKELGSDILKEYPVETTQLQNEKLYLYYLQNGRDMYVDQELDINRLSDYDVDHIVPQSFLKDDSIDNKVLTRSDKNRGKSDNVPSEEVVKKMKNYWKQLLNAKLITQRKFDNLTKAERGGLSELDKAGFIKRQLVETRQITKHVAQILDSRMNTKYDENDKLIREVRVITLKSKLVSDFRKDFQFYKVREINNYHHAHDAYLNAVVGTALIKKYPKLESEFVYGDYKVYDIRKMIAKSEQEIGKATAKYFFYSNIMNFFKTEITLANGEIRKRPLIETNGETGEIVWDKGRDFATVRKVLSMPQVNIVKKTEVQTGGFSKESILPKRNSDKLIARKKDWDPKKYGGFDSPTVAYSVLVVAKVEKGKSKKLKSVKELVGITIMERSSFEKDPVDFLEAKGYKEVRKDLIIKLPKYSLFELENGRKRMLASAGELQKGNELALPSKYVNFLYLASHYEKLKGSPEDNEQKQLFVEQHKHYLDEIIEQISEFSKRVILADANLDKVLSAYNKHRDKPIREQAENIIHLFTLTNLGAPAAFKCFDTTIGRNRYKSIKEVLDATLIHQSITGLYETRIDLSQLGGD

SEQ ID NO: 22 - protein, 1367 aa, Streptococcus pyogenes; identical to SEQ ID NO: 2

SEQ ID NO: 23 - protein, 1368 aa, Streptococcus pyogenes
MDKKYSIGLDIGTNSVGWAVITDDYKVPSKKFKVLGNTDRHSIKKNLIGALLFDSGETAEATRLKRTARRRYTRRKNRICYLQEIFSNEMAKVDDSFFHRLEESFLVEEDKKHERHPIFGNIVDEVAYHEKYPTIYHLRKKLVDSTDKADLRLIYLALAHMIKFRGHFLIEGDLNPDNSDVDKLFIQLVQTYNQLFEENPINASGVDAKAILSARLSKSRRLENLIAQLPGEKKNGLFGNLIALSLGLTPNFKSNFDLAEDAKLQLSKDTYDDDLDNLLAQIGDQYADLFLAAKNLSDAILLSDILRLNSEITKAPLSASMIKRYDEHHQDLTLLKALVRQQLPEKYKEIFFDQSKNGYAGYIDGGASQEEFYKFIKPILEKMDGTEELLAKLNREDLLRKQRTFDNGSIPHQIHLGELHAILRRQEDFYPFLKDNREKIEKILTFRIPYYVGPLARGNSRFAWMTRKSEETITPWNFEEVVDKGASAQSFIERMTNFDKNLPNEKVLPKHSLLYEYFTVYNELTKVKYVTEGMRKPAFLSGEQKKAIVDLLFKTNRKVTVKQLKEDYFKKIECFDSVEISGVEDRFNASLGTYHDLLKIIKDKDFLDNEENEDILEDIVLTLTLFEDREMIEERLKTYAHLFDDKVMKQLKRRRYTGWGRLSRKLINGIRDKQSGKTILDFLKSDGFANRNFMQLIHDDSLTFKEDIQKAQVSGQGDSLHEHIANLAGSPAIKKGILQTVKVVDELVKVMGRHKPENIVIEMARENQTTQKGQKNSRERMKRIEEGIKELGSQILKEHPVENTQLQNEKLYLYYLQNGRDMYVDQELDINRLSDYDVDHIVPQSFIKDDSIDNKVLTRSDKNRGKSDNVPSEEVVKKMKNYWRQLLNAKLITQRKFDNLTKAERGGLSELDKAGFIKRQLVETRQITKHVAQILDSRMNTKYDENDKLIREVKVITLKSKLVSDFRKDFQFYKVREINNYHHAHDAYLNAVVGTALIKKYPKLESEFVYGDYKVYDVRKMIAKSEQEIGKATAKYFFYSNIMNFFKTEITLANGEIRKRPLIETNGETGEIVWDKGRDFATVRKVLSMPQVNIVKKTEVQTGGFSKESILPKRNSDKLIARKKDWDPKKYGGFDSPTVAYSVLVVAKVEKGKSKKLKSVKELLGLTIMERSSFEKNPIDFLEAKGYKEVKKDLIIKLPKYSLFELENGRKRMLASAGELQKGNELALPSKYVNFLYLASHYEKLKGSPEDNEQKQLFVEQHKHYLDEIIEQISEFSKRVILADANLDKVLSAYNKHRDKPIREQAENIIHLFTLTNLGAPAAFKYFDTTIDRKRYTSTKEVLDATLIHQSITGLYETRIDLSQLGGD

SEQ ID NO: 24 - protein, 1367 aa, Streptococcus pyogenes
MDKKYSIGLDIGTNSVGWAVITDDYKVPSKKLKVLGNTDRHGIKKNLIGALLFDSGETAEATRLKRTARRRYTRRKNRICYLQEIFSNEMAKVDDSFFHRLEESFLVEEDKKHERHPIFGNIVDEVAYHEKYPTIYHLRKKLADSTDKVDLRLIYLALAHMIKFRGHFLIEGDLNPDNSDVDKLFIQLVQTYNQLFEENPINASRVDAKAILSARLSKSRRLENLIAQLPGEKKNGLFGNLIALSLGLTPNFKSNFDLAEDAKLQLSKDTYDDDLDNLLAQIGDQYADLFLAAKNLSDAILLSDILRVNSEITKAPLSASMIKRYDEHHQDLTLLKALVRQQLPEKYKEIFFDQSKNGYAGYIDGGASQEEFYKFIKPILEKMDGTEELLAKLNREDLLRKQRTFDNGSIPYQIHLGELHAILRRQEDFYPFLKDNREKIEKILTFRIPYYVGPLARGNSRFAWMTRKSEETITPWNFEEVVDKGASAQSFIERMTNFDKNLPNEKVLPKHSLLYEYFTVYNELTKVKYVTEGMRKPAFLSGEQKKAIVDLLFKTNRKVTVKQLKEDYFKKIECFDSVEISGVEDRFNTSLGTYHDLLKIIKDKDFLDNEENEDILEDIVLTLTLFEDKEMIEERLKKYANLFDDKVMKQLKRRHYTGWGRLSRKLINGIRDKQSGKTILDFLKSDGFANRNFMQLINDDSLTFKEAIQKAQVSGQGHSLHEQIANLAGSPAIKKGILQTVKIVDELVKVMGHKPENIVIEMARENQTTQKGQKNSRERMKRIEEGIKELGSQILKEHPVENTQLQNEKLYLYYLQNGRDMYVDQELDINRLSDYDVDHIVPQSFLKDDSIDNKVLTRSDKNRGKSDNVPSEEVVKKMKNYWRQLLNAKLITQRKFDNLTKAERGGLSELDKAGFIKRQLVETRQITKHVAQILDSRMNTKYDENDKLIREVKVITLKSKLVSDFRKDFQFYKVREINNYHHAHDAYLNAVVGTALIKKYPKLESEFVYGDYKVYDVRKMIAKSEQEIGKATAKYFFYSNIMNFFKTEITLANGEIRKRPLIETNGETGEIVWDKGRDFATVRKVLSMPQVNIVKKTEVQTGGFSKESILPKRNSDKLIARKKDWDPKKYGGFDSPTVAYSVLVVAKVEKGKSKKLKSVKELLGITIMERSSFEKNPIDFLEAKGYKEVRKDLIIKLPKYSLFELENGRKRMLASAGELQKGNELALPSKYVNFLYLASHYEKLKGSPEDNEQKQLFVEQHKHYLDEIIEQISEFSKRVILADANLDKVLSAYNKHRDKPIREQAKNIIHLFTLTNLGAPAAFKYFDTTIERNRYKSIKEVLDATLIHQSITGLYETRIDLSQLGGD

SEQ ID NO: 25 - protein, 1367 aa, Streptococcus pyogenes
MDKKYSIGLDIGTNSVGWAVITDDYKVPSKKLKVLGNTDRHGIKKNLIGALLFDSGETAEATRLKRTARRRYTRRKNRICYLQEIFSNEMAKVDDSFFHRLEESFLVEEDKKHERHPIFGNIVDEVAYHEKYPTIYHLRKKLADSTDKVDLRLIYLALAHMIKFRGHFLIEGDLNPDNSDVDKLFIQLVQTYNQLFEENPINASRVDAKAILSARLSKSRRLENLIAQLPGEKKNGLFGNLIALSLGLTPNFKSNFDLAEDAKLQLSKDTYDDDLDNLLAQIGDQYADLFLAAKNLSDAILLSDILRVNSEITKAPLSASMIKRYDEHHQDLTLLKALVRQQLPEKYKEIFFDQSKNGYAGYIDGGASQEEFYKFIKPILEKMDGTEELLAKLNREDLLRKQRTFDNGSIPYQIHLGELHAILRRQEDFYPFLKDNREKIEKILTFRIPYYVGPLARGNSRFAWMTRKSEETITPWNFEEVVDKGASAQSFIERMTNFDKNLPNEKVLPKHSLLYEYFTVYNELTKVKYVTEGMRKPAFLSGEQKKAIVDLLFKTNRKVTVKQLKEDYFKKIECFDSVEISGVEDRFNTSLGTYHDLLKIIKDKDFLDNEENEDILEDIVLTLTLFEDKEMIEERLKKYANLFDDKVMKQLKRRHYTGWGRLSRKLINGIRDKQSGKTILDFLKSDGFANRNFMQLINDDSLTFKEAIQKAQVSGQGHSLHEQIANLAGSPAIKKGILQTVKIVDELVKVMGHKPENIVIEMARENQTTQKGQKNSRERMKRIEEGIKELGSQILKEHPVENTQLQNEKLYLYYLQNGRDMYVDQELDINRLSDYDVDHIVPQSFLKDDSIDNKVLTRSDKNRGKSDNVPSEEVVKKMKNYWRQLLNAKLITQRKFDNLTKAERGGLSELDKAGFIKRQLVETRQITKHVAQILDSRMNTKYDENDKLIREVKVITLKSKLVSDFRKDFQFYKVREINNYHHAHDAYLNAVVGTALIKKYPKLESEFVYGDYKVYDVRKMIAKSEQEIGKATAKYFFYSNIMNFFKTEITLANGEIRKRPLIETNGETGEIVWDKGRDFATVRKVLSMPQVNIVKKTEVQTGGFSKESILPKRNSDKLIARKKDWDPKKYGGFDSPTVAYSVLVVAKVEKGKSKKLKSVKELLGITIMERSSFEKNPIDFLEAKGYKEVRKDLIIKLPKYSLFELENGRKRMLASAGELQKGNELALPSKYVNFLYLASHYEKLKGSPEDNEQKQLFVEQHKHYLDEIIEQISEFSKRVILADANLDKVLSAYNKHRDKPIREQAKNIIHLFTLTNLGAPAAFKYFDTTIERNRYKSIKEVLDATLIHQSITGLYEIRIDLSQLGGD

SEQ ID NO: 26 - protein, 1368 aa, Streptococcus pyogenes
MDKKYSIGLDIGTNSVGWAVITDDYKVPSKKFKVLGNTDRHSIKKNLIGALLFDSGETAEATRLKRTARRRYTRRKNRICYLQEIFSNEMAKVDDSFFHRLEESFLVEEDKKHERHPIFGNIVDEVAYHEKYPTIYHLRKKLVDSTDKADLRLIYLALAHMIKFRGHFLIEGDLNPDNSDVDKLFIQLVQTYNQLFEENPINASGVDAKAILSARLSKSRRLENLIAQLPGEKKNGLFGNLIALSLGLTPNFKSNFDLAEDAKLQLSKDTYDDDLDNLLAQIGDQYADLFLAAKNLSDAILLSDILRVNTEITKASLSASMIKRYDEHHQDLTLLKALVRQQLPEKYKEIFFDQSKNGYAGYIDGGASQEEFYKFIKPILEKMDGTEELLVKLNREDLLRKQRTFDNGSIPHQIHLGELHAILRRQEDFYPFLKDNREKIEKILTFRIPYYVGPLARGNSRFAWMTRKSEETITPWNFEEVVDKGASAQSFIERMTNFDKNLPNEKVLPKHSLLYEYFTVYNELTKVKYVTEGMRKPAFLSGEQKKAIVDLLFKTNRKVTVKQLKEDYFKKIECFDSVEISGVEDRFNASLGTYHDLLKIIKDKDFLDNEENEDILEDIVLTLTLFEDREMIEERLKTYAHLFDDKVMKQLKRRRYTGWGRLSRKLINGIRDKQSGKTILDFLKSDGFANRNFMQLIHDDSLTFKEDLQKAQVSGQGDSLHEHIANLAGSPAIKKGILQTVKVVDELVKVMGRHKPENIVIEMARENQTTQKGQKNSRERMKRIEEGIKELGSDILKEYPVENTQLQNEKLYLYYLQNGRDMYVDQELDINRLSDYDVDHIVPQSFIKDDSIDNKVLTRSDKNRGKSDNVPSEEVVKKMKNYWRQLLNAKLITQRKFDNLTKAERGGLSELDKAGFIKRQLVETRQITKHVAQILDSRMNTKYDENDKLIREVKVITLKSKLVSDFRKDFQFYKVREINNYHHAHDAYLNAVVGTALIKKYPKLESEFVYGDYKVYDVRKMIAKSEQEIGKATAKYFFYSNIMNFFKTEITLANGEIRKRPLIETNGETGEIVWDKGRDFATVRKVLSMPQVNIVKKTEVQTGGFSKESILPKRNSDKLIARKKDWDPKKYGGFDSPTVAYSVLVVAKVEKGKSKKLKSVKELLGITIMERSSFEKNPIDFLEAKGYKEVRKDLIIKLPKYSLFELENGRKRMLASAGELQKGNELALPSKYVNFLYLASHYEKLKGSPEDNEQKQLFVEQHKHYLDEIIEQISEFSKRVILADANLDKVLSAYNKHRDKPIREQAENIIHLFTLTNLGAPAAFKYFDTTIGRNRYKSIKEVLDATLIHQSITGLYETRIDLSQLGGD

SEQ ID NO: 27 - protein, 1368 aa, Streptococcus pyogenes
MDKKYSIGLDIGTNSVGWAVITDDYKVPSKKFKVLGNTDRHGIKKNLIGALLFDSGETAEATRLKRTARRRYTRRKNRICYLQEIFSNEMAKVDDSFFHRLEESFLVEEDKKHERHPIFGNIVDEVAYHEKYPTIYHLRKKLADSTDKVDLRLIYLALAHMIKFRGHFLIEGDLNPDNSDVDKLFIQLVQTYNQLFEENPINASRVDAKAILSARLSKSRRLENLIAQLPGEKKNGLFGNLIALSLGLTPNFKSNFDLAEDAKLQLSKDTYDDDLDNLLAQIGDQYADLFLAAKNLSDATLLSDILRVNSEITKAPLSASMIKRYDEHHQDLTLLKALVRQQLPEKYKEIFFDQSKNGYAGYIDGGASQEEFYKFIKPILEKMDGTEELLAKLNREDLLRKQRTFDNGSIPYQIHLGELHAILRRQEDFYPFLKDNREKIEKILTFRIPYYVGPLARGNSRFAWMTRKSEETITPWNFEEVVDKGASAQSFIERMTNFDKNLPNEKVLPKHSLLYEYFTVYNELTKVKYVTEGMRKPAFLSGEQKKAIVDLLFKTNRKVTVKQLKEDYFKKIECFDSVEISGVEDRFNASLGTYHDLLKIIKDKDFLDNEENEDILEDIVLTLTLFEDREMIEERLKTYAHLFDDKVMKQLKRRRYTGWGRLSRKLINGIRDKQSGKTILDFLKSDGFANRNFMQLIHDDSLTFKEDIQKAQVSGQGDSLHEHIANLAGSPAIKKGILQTVKVVDELVKVMGRHKPENIVIEMARENQTTQKGQKNSRERMKRIEEGIKELGSDILKEYPVENTQLQNEKLYLYYLQNGRDMYVDQELDINRLSDYDVDHIVPQSFLKDDSIDNKVLTRSDKNRGKSDNVPSEEVVKKMKNYWRQLLNAKLITQRKFDNLTKAERGGLSELDKAGFIKRQLVETRQITKHVAQILDSRMNTKYDENDKLIREVKVITLKSKLVSDFRKDFQFYKVREINNYHHAHDAYLNAVVGTALIKKYPKLESEFVYGDYKVYDVRKMIAKSEQEIGKATAKYFFYSNIMNFFKTEITLANGEIRKRPLIETNGETGEIVWDKGRDFATVRKVLSMPQVNIVKKTEVQTGGFSKESILPKRNSDKLIARKKDWDPKKYGGFDSPTVAYSVLVVAKVEKGKSKKLKSVKELLGITIMERSSFEKNPIDFLEAKGYKEVRKDLIIKLPKYSLFELENGRKRMLASAGELQKGNELALPSKYVNFLYLASHYEKLKGSPEDNEQKQLFVEQHKHYLDEIIEQISEFSKRVILADANLDKVLSAYNKHRDKPIREQAENIIHLFTLTNLGAPAAFKYFDTTIDRKRYTSTKEVLDATLIHQSITGLYETRIDLSQLGGD

SEQ ID NO: 28 - protein, 1368 aa, Streptococcus pyogenes
MDKKYSIGLDIGTNSVGWAVITDDYKVPSKKFKVLGNTDRHSIKKNLIGALLFDSGETAEATRLKRTARRRYTRRKNRICYLQEIFSNEMAKVDDSFFHRLEESFLVEEDKKHERHPIFGNIVDEVAYHEKYPTIYHLRKKLADSTDKADLRLIYLALAHMIKFRGHFLIEGDLNPDNSDVDKLFIQLVQTYNQLFEENPINASRVDAKAILSARLSKSRRLENLIAQLPGEKRNGLFGNLIALSLGLTPNFKSNFDLAEDAKLQLSKDTYDDDLDNLLAQIGDQYADLFLAAKNLSDAILLSDILRVNSEITKAPLSASMIKRYDEHHQDLTLLKALVRQQLPEKYKEIFFDQSKNGYAGYIDGGASQEEFYKFIKPILEKMDGTEELLAKLNREDLLRKQRTFDNGSIPHQIHLGELHAILRRQEDFYPFLKDNREKIEKILTFRIPYYVGPLARGNSRFAWMTRKSEETITPWNFEEVVDKGASAQSFIERMTNFDKNLPNEKVLPKHSLLYEYFTVYNELTKVKYVTEGMRKPEFLSGEQKKAIVDLLFKTNRKVTVKQLKEDYFKKIECFDSVEISGVEDRFNASLGTYHDLLKIIKDKDFLDNEENEDILEDIVLTLTLFEDREMIEERLKTYAHLFDDKVMKQLKRRRYTGWGRLSRKLINGIRDKQSGKTILDFLKSDGFANRNFMQLIHDDSLTFKEDIQKAQVSGQGDSLHEHIANLAGSPAIKKGILQTVKVVDELVKVMGRHKPENIVIEMARENQTTQKGQKNSRERMKRIEEGIKELGSDILKEYPVENTQLQNEKLYLYYLQNGRDMYVDQELDINRLSDYDVDHIVPQSFIKDDSIDNKVLTRSDKNRGKSDNVPSEEVVKKMKNYWKQLLNAKLITQRKFDNLTKAERGGLSELDKAGFIKRQLVETRQITKHVAQILDSRMNTKYDENDKLIREVKVITLKSKLVSDFRKDFQFYKVREINNYHHAHDAYLNAVVGTALIKKYPKLESEFVYGDYKVYDVRKMIAKSEQEIGKATAKYFFYSNIMNFFKTEITLANGEIRKRPLIETNGETGEIVWDKGRDFATVRKVLSMPQVNIVKKTEVQTGGFSKESILPKRNSDKLIARKKDWDPKKYGGFDSPTVAYSVLVVAKVEKGKSKKLKSVKELLGITIMERSSFEKNPIDFLEAKGYKEVRKDLIIKLPKYSLFELENGRKRMLASAGELQKGNELALPSKYVNFLYLASHYEKLKGSPEDNEQKQLFVEQHKHYLDEIIEQISEFSKRVILADANLDKVLSAYNKHRDKPIREQAENIIHLFTLTNFGAPAAFIYFDTTIGRNRYKSIKEVLDATLIHQSITGLYETRIDLSQLGGD

SEQ ID NO: 29 - protein, 1368 aa, Streptococcus pyogenes
MDKKYSIGLDIGTNSVGWAVITDDYKVPSKKFKVLGNTDRHSIKKNLIGALLFDSGETAEATRLKRTARRRYTRRKNRICYLQEIFSNEIAKVDDSFFHRLEESFLVEEDKKHERHPIFGNIVDEVAYHEKYPTIYHLRKKLADSTDKADLRLIYLALAHMIKFRGHFLIEGDLNPDNSDVDKLFIQLVQTYNQLFEENPINASRVDAKAILSARLSKSRRLENLIAQLPGEKRNGLFGNLIALSLGLTPNFKSNFDLAEDAKLQLSKDTYDDDLDNLLAQIGDQYADLFLAAKNLSDAILLSDILRVNTEITKAPLSASMIKRYDEHHQDLTLLKALVRQQLPEKYKEIFFDQSKNGYAGYIDGGASQEEFYKFIKPILEKMDGTEELLAKLNREDLLRKQRTFDNGSIPHQIHLGELHAILRRQEDFYPFLKDNREKIEKILTFRIPYYVGPLARGNSRFAWMTRKSEETITPWNFEEVVDKGASAQSFIERMTNFDKNLPNEKVLPKHSLLYEYFTVYNELTKVKYVTEGMRKPAFLSGEQKKAIVDLLFKTNRKVTVKQLKEDYFKKIECFDSVEISGVEDRFNASLGTYHDLLKIIKDKDFLDNEENEDILEDIVLTLTLFEDREMIEERLKTYAHLFDDKVMKQLKRRRYTGWGRLSRKLINGIRDKQSGKTILDFLKSDGFANRNFMQLIHDDSLTFKEDLQKAQVSGQGDSLHEHIANLAGSPAIKKGILQTVKVVDELVKVMGRHKPENIVIEMARENQTTQKGQKNSRERMKRIEEGIKELGSDILKEYPVENTQLQNEKLYLYYLQNGRDMYVDQELDINRLSDYDVDHIVPQSFLKDDSIDNKVLTRSDKNRGKSDNVPSEEVVKKMKNYWKQLLNAKLITQRKFDNLTKAERGGLSELDKAGFIKRQLVETRQITKHVAQILDSRMNTKYDENDKLIREVRVITLKSKLVSDFRKDFQFYKVREINNYHHAHDAYLNAVVGTALIKKYPKLESEFVYGDYKVYDIRKMIAKSEQEIGKATAKYFFYSNIMNFFKTEITLANGEIRKRPLIETNGETGEIVWDKGRDFATVRKVLSMPQVNIVKKTEVQTGGFSKESILPKRNSDKLIARKKDWDPKKYGGFDSPTVAYSVLVVAKVEKGKSKKLKSVKELVGITIMERSSFEKDPVDFLEAKGYKEVRKDLIIKLPKYSLFELENGRKRMLASAGELQKGNELALPSKYVNFLYLASHYEKLKGSPEDNEQKQLFVEQHKHYLDEIIEQISEFSKRVILADANLDKVLSAYNKHRDKPIREQAENIIHLFTLTNLGAPAAFKYFDTTIGRNRYKSIKEVLDATLIHQSITGLYETRIDLSQLGGD

SEQ ID NO: 30 - protein, 1368 aa, Streptococcus pyogenes
MDKKYSIGLDIGTNSVGWAVITDDYKVPSKKFKVLGNTDRHSIKKNLIGALLFDSGETAEATRLKRTARRRYTRRKNRICYLQEIFSNEIAKVDDSFFHRLEESFLVEEDKKHERHPIFGNIVDEVAYHEKYPTIYHLRKKLADSTDKADLRLIYLALAHMIKFRGHFLIEGGLNPDNSDVDKLFIQLVQTYNQLFEENPINASRVDAKAILSARLSKSRRLENLIAQLPGEKRNGLFGNLIALSLGLTPNFKSNFDLAEDAKLQLSKDTYDDDLDNLLAQIGDQYADLFLAAKNLSDAILLSDILRVNTEITKAPLSASMIKRYDEHHQDLTLLKALVRQQLPEKYKEIFFDQSKNGYAGYIDGGASQEEFYKFIKPILEKMDGTEELLAKLNREDLLRKQRTFDNGSIPHQIHLGELHAILRRQEDFYPFLKDNREKIEKILTFRIPYYVGPLARGNSRFAWMTRKSEETITPWNFEEVVDKGASAQSFIERMTNFDKNLPNEKVLPKHSLLYEYFTVYNELTKVKYVTEGMRKPAFLSGEQKKAIVDLLFKTNRKVTVKQLKEDYFKKIECFDSVEISGVEDRFNASLGTYHDLLKIIKDKDFLDNEENEDILEDIVLTLTLFEDREMIEERLKTYAHLFDDKVMKQLKRRRYTGWGRLSRKLINGIRDKQSGKTILDFLKSDGFANRNFMQLIHDDSLTFKEDLQKAQVSGQGDSLHEHIANLAGSPAIKKGILQTVKVVDELVKVMGRHKPENIVIEMARENQTTQKGQKNSRERMKRIEEGIKELGSDILKEYPVENTQLQNEKLYLYYLQNGRDMYVDQELDINRLSDYDVDHIVPQSFLKDDSIDNKVLTRSDKNRGKSDNVPSEEVVKKMKNYWKQLLNAKLITQRKFDNLTKAERGGLSELDKAGFIKRQLVETRQITKHVAQILDSRMNTKYDENDKLIREVRVITLKSKLVSDFRKDFQFYKVREINNYHHAHDAYLNAVVGTALIKKYPKLESEFVYGDYKVYDIRKMIAKSEQEIGKATAKYFFYSNIMNFFKTEITLANGEIRKRPLIETNGETGEIVWDKGRDFATVRKVLSMPQVNIVKKTEVQTGGFSKESILPKRNSDKLIARKKDWDPKKYGGFDSPTVAYSVLVVAKVEKGKSKKLKSVKELVGITIMERSSFEKDPVDFLEAKGYKEVRKDLIIKLPKYSLFELENGRKRMLASAGELQKGNELALPSKYVNFLYLASHYEKLKGSPEDNEQKQLFVEQHKHYLDEIIEQISEFSKRVILADANLDKVLSAYNKHRDKPIREQAENIIHLFTLTNLGAPAAFKYFDTTIGRNRYKSIKEVLDATLIHQSITGLYETRIDLSQLGGD

SEQ ID NO: 31 - protein, 1368 aa, Streptococcus pyogenes
MDKKYSIGLDIGTNSVGWAVITDDYKVPSKKFKVLGNTDRHSIKKNLIGALLFDSGETAEATRLKRTARRRYTRRKNRICYLQEIFSNEMAKVDDSFFHRLEESFLVEEDKKHERHPIFGNIVDEVAYHEKYPTIYHLRKKLVDSTDKADLRLIYLALAHMIKFRGHFLIEGDLNPDNSDVDKLFIQLVQTYNQLFEENPINANGVDAKAILSARLSKSRRLENLIAQLPGEKKNGLFGNLIALSLGLTPNFKSNFDLAEDAKLQLSKDTYDDDLDNLLAQIGDQYADLFLAAKNLSDAILLSDILRVNTEITKAPLSASMIKRYDEHHQDLTLLKALVRQQLPEKYKEIFFDQSKNGYAGYIDGGASQEEFYKFIKPILEKMDGTEELLVKLNREDLLRKQRTFDNGSIPHQIHLGELHAILRRQEDFYPFLKDNREKIEKILTFRIPYYVGPLARGNSRFAWMTRKSEETITPWNFEEVVDKGASAQSFIERMTNFDKNLPNEKVLPKHSLLYEYFTVYNELTKVKYVTEGMRKPAFLSGEQKKAIVDLLFKTNRKVTVKQLKEDYFKKIECFDSVEISGVEDRFNASLGTYHDLLKIIKDKDFLDNEENEDILEDIVLTLTLFEDREMIEERLKTYAHLFDDKVMKQLKRRRYTGWGRLSRKLINGIRDKQSGKTILDFLKSDGFANRNFMQLIHDDSLTFKEDIQKAQVSGQGDSLHEHIANLAGSPAIKKGILQTVKVVDELVKVMGRHKPENIVIEMARENQTTQKGQKNSRERMKRIEEGIKELGSQILKEHPVENTQLQNEKLYLYYLQNGRDMYVDQELDINRLSDYDVDHIVPQSFLKDDSIDNKVLTRSDKNRGKSDNVPSEEVVKKMKNYWRQLLNAKLITQRKFDNLTKAERGGLSELDKAGFIKRQLVETRQITKHVAQILDSRMNTKYDENDKLIREVKVITLKSKLVSDFRKDFQFYKVREINNYHHAHDAYLNAVVGTALIKKYPKLESEFVYGDYKVYDVRKMIAKSEQEIGKATAKYFFYSNIMNFFKTEITLANGEIRKRPLIETNGETGEIVWDKGRDFATVRKVLSMPQVNIVKKTEVQTGGFSKESILPKRNSDKLIARKKDWDPKKYGGFDSPTVAYSVLVVAKVEKGKSKKLKSVKELLGITIMERSSFEKNPIDFLEAKGYKEVKKDLIIKLPKYSLFELENGRKRMLASAGELQKGNELALPSKYVNFLYLASHYEKLKGSPEDNEQKQLFVEQHKHYLDEIIEQISEFSKRVILADANLDKVLSAYNKHRDKPIREQAENIIHLFTLTNLGAPAAFKYFDTTIDRKRYTSTKEVLDATLIHQSITGLYETRIDLSQLGGD

SEQ ID NO: 32 - protein, 1368 aa, Streptococcus pyogenes
MDKKYSIGLDIGTNSVGWAVITDDYKVPSKKFKVLGNTDRHSIKKNLIGALLFDSGETAEATRLKRTARRRYTRRKNRICYLQEIFSNEMAKVDDSFFHRLEESFLVEEDKKHERHPIFGNIVDEVAYHEKYPTIYHLRKKLADSTDKADLRLIYLALAHMIKFRGHFLIEGDLNPDNSDVDKLFIQLVQTYNQLFEENPINASRVDAKAILSARLSKSRRLENLIAQLPGEKKNGLFGNLIALLLGLTPNFKSNFDLAEDAKLQLSKDTYDDDLDNLLAQIGDQYADLFLAAKNLSDAILLSDILRVNSEITKAPLSASMIKRYDEHHQDLTLLKALVRQQLPEKYKEIFFDQSKNGYAGYIDGGASQEEFYKFIKPILEKMDGTEELLAKLNREDLLRKQRTFDNGSIPHQIHLGELHAILRRQEDFYPFLKDNREKIEKILTFRIPYYVGPLARGNSRFAWMTRKSEETITPWNFEEVVDKGASAQSFIERMTNFDKNLPNEKVLPKHSLLYEYFTVYNELTKVKYVTEGMRKPAFLSGEQKKAIVDLLFKTNRKVTVKQLKEDYFKKIECFDSVEISGVEDRFNASLGTYHDLLKIIKDKDFLDNEENEDILEDIVLTLTLFEDKEMIEERLKKYAHLFDDKVMKQLKRRRYTGWGRLSRKLINGIRDKQSGKTILDFLKSDGFANRNFMQLIHDDSLTFKEDIQKAQVSGQGDSLHEHIANLAGSPAIKKGILQTVKVVDELVKVMGRHKPENIVIEMARENQTTQKGQKNSRERMKRIEEGIKELGSDILKEYPVENTQLQNEKLYLYYLQNGRDMYVDQELDINRLSDYDVDHIVPQSFLKDDSIDNKVLTRSDKNRGKSDNVPSEEVVKKMKNYWKQLLNAKLITQRKFDNLTKAERGGLSELDKAGFIKRQLVETRQITKHVAQILDSRMNTKYDENDKLIREVRVITLKSKLVSDFRKDFQFYKVREINNYHHAHDAYLNAVVGTALIKKYPKLESEFVYGDYKVYDVRKMIAKSEQEIGKATAKYFFYSNIMNFFKTEITLANGEIRKRPLIETNGETGEIVWDKGRDFATVRKVLSMPQVNIVKKTEVQTGGFSKESILPKRNSDKLIARKKDWDPKKYGGFDSPTVAYSVLVVAKVEKGKSKKLKSVKELLGITIMERSSFEKNPIDFLEAKGYKEVRKDLIIKLPKYSLFELENGRKRMLASAGELQKGNELALPSKYVNFLYLASHYEKLKGSPEDNEQKQLFVEQHKHYLDEIIEQISEFSKRVILADANLDKVLSAYNKHRDKPIREQAENIIHLFTLTNLGAPAAFKYFDTTIDRKRYTSTKEVLDATLIHQSITGLYETRIDLSQLGGD

SEQ ID NO: 33 - protein, 1368 aa, Streptococcus pyogenes
MDKKYSIGLDIGTNSVGWAVITDDYKVPSKKFKVLGNTDRHSIKKNLIGALLFDSGEIAEATRLKRTARRRYTRRKNRICYLQEIFSNEMAKVDDSFFHRLEESFLVEEDKKHERHPIFGNIVDEVAYHEKYPTIYHLRKKLVDSTDKADLRLIYLALAHMIKFRGHFLIEGDLNPDNSDVDKLFIQLVQTYNQLFEENPINASGVDAKAILSARLSKSRRLENLIAQLPGEKKNGLFGNLIALSLGLTPNFKSNFDLAEDAKLQLSKDTYDDDLDNLLAQIGDQYADLFLAAKNLSDAILLSDILRLNSEITKAPLSASMIKRYDEHHQDLTLLKALVRQQLPEKYKEIFFDQSKNGYAGYIDGGASQEEFYKFIKPILEKMDGTEELLAKLNRKDLLRKQRTFDNGSIPHQIHLGELHAILRRQEDFYPFLKDNREKIEKILTFRIPYYVGPLARGNSRFAWMTRKSEETITPWNFEEVVDKGASAQSFIERMTNFDKNLPNEKVLPKHSLLYEYFTVYNELTKVKYVTEGMRKPAFLSGEQKKAIVDLLFKTNRKVTVKQLKEDYFKKIECFDSVEISGVEDRFNASLGTYHDLLKIIKDKDFLDNEENEDILEDIVLTLTLFEDREMIEERLKTYAHLFDDKVMKQLKRRRYTGWGRLSRKLINGIRDKQSGKTILDFLKSDGFANRNFMQLIHDDSLTFKEDIQKAQVSGQGDSLHEHIANLAGSPAIKKGILQTVKVVDELVKVMGRHKPENIVIEMARENQTTQKGQKNSRERMKRIEEGIKELGSQILKEHPVENTQLQNEKLYLYYLQNGRDMYVDQELDINRLSDYDVDHIVPQSFIKDDSIDNKVLTRSDKNRGKSDNVPSEEVVKKMKNYWRQLLNAKLITQRKFDNLTKAERGGLSELDKAGFIKRQLVETRQITKHVAQILDSRMNTKYDENDKLIREVKVITLKSKLVSDFRKDFQFYKVREINNYHHAHDAYLNAVVGTALIKKYPKLESEFVYGDYKVYDVRKMLAKSEQEIGKATAKYFFYSNIMNFFKTEITLANGEIRKRPLIETNGETGEIVWDKGRDFATVRKVLSMPQVNIVKKTEVQTGGFSKESILPKRNSDKLIARKKDWDPKKYGGFDSPTVAYSVLVVAKVEKGKSKKLKSVKELLGITIMERSSFEKNPIDFLEAKGYKEVRKDLIIKLPKYSLFELENGRKRMLASAGELQKGNELALPSKYVNFLYLASHYEKLKGSPEDNEQKQLFVEQHKHYLDEIIEQISEFSKRVILADANLDKVLSAYNKHRDKPIREQAENIIHLFTLTNLGAPTAFKYFDTTIDRKRYTSTKEVLDATFIHQSITGLYETRIDLSQLGGD

SEQ ID NO: 34 - protein, 1193 aa, Streptococcus pyogenes
PDNSDVDKLFIQLVQTYNQLFEENPINASGVDAKAILSARLSKSRRLENLIAQLPGEKKNGLFGNLIALSLGLTPNFKSNFDLAEDAKLQLSKDTYDDDLDNLLAQIGDQYADLFLAAKNLSDAILLSDILRVNTEITKAPLSASMIKRYDEHHQDLTLLKALVRQQLPEKYKEIFFDQSKNGYAGYIDGGASQEEFYKFIKPILEKMDGTEELLVKLNREDLLRKQRTFDNGSIPHQIHLGELHAILRRQEDFYPFLKDNREKIEKILTFRIPYYVGPLARGNSRFAWMTRKSEETITPWNFEEVVDKGASAQSFIERMTNFDKNLPNEKVLPKHSLLYEYFTVYNELTKVKYVTEGMRKPAFLSGEQKKAIVDLLFKTNRKVTVKQLKEDYFKKIECFDSVEISGVEDRFNASLGTYHDLLKIIKDKDFLDNEENEDILEDIVLTLTLFEDREMIEERLKTYAHLFDDKVMKQLKRRRYTGWGRLSRKLINGIRDKQSGKTILDFLKSDGFANRNFMQLIHDDSLTFKEDIQKAQVSGQGDSLHEHIANLAGSPAIKKGILQTVKVVDELVKVMGRHKPENIVIEMARENQTTQKGQKNSRERMKRIEEGIKELGSQILKEHPVENTQLQNEKLYLYYLQNGRDMYVDQELDINRLSDYDVDHIVPQSFLKDDSIDNKVLTRSDKNRGKSDNVPSEEVVKKMKNYWRQLLNAKLITQRKFDNLTKAERGGLSELDKAGFIKRQLVETRQITKHVAQILDSRMNTKYDENDKLIREVKVITLKSKLVSDFRKDFQFYKVREINNYHHAHDAYLNAVVGTALIKKYPKLESEFVYGDYKVYDVRKMIAKSEQEIGKATAKYFFYSNIMNFFKTEITLANGEIRKRPLIETNGETGEIVWDKGRDFATVRKVLSMPQVNIVKKTEVQTGGFSKESILPKRNSDKLIARKKDWDPKKYGGFDSPTVAYSVLVVAKVEKGKSKKLKSVKELLGITIMERSSFEKNPIDFLEAKGYKEVKKDLIIKLPKYSLFELENGRKRMLASAGELQKGNELALPSKYVNFLYLASHYEKLKGSPEDNEQKQLFVEQHKHYLDEIIEQISEFSKRVILADANLDKVLSAYNKHRDKPIREQAENIIHLFTLTNLGAPAAFKYFDTTIDRKRYTSTKEVLDATLIHQSITGLYETRIDLSQLGGD

SEQ ID NO: 35 - protein, 1368 aa, Streptococcus pyogenes
MDKKYSIGLDIGTNSVGWAVITDDYKVPSKKFKVLGNTDRHSIKKNLIGALLFDSGETAEATRLKRTARRRYTRRKNRICYLQEIFSNEMAKVDDSFFHRLEESFLVEEDKKHERHPIFGNIVDEVAYHEKYPTIYHLRKKLADSTDKADLRLIYLALAHMIKFRGHFLIEGDLNPDNSDVDKLFIQLVQTYNQLFEENPINASRVDAKAILSARLSKSRRLENLIAQLPGEKKNGLFGNLIALSLGLTPNFKSNFDLAEDAKLQLSKDTYDDDLDNLLAQIGDQYADLFLAAKNLSDATLLSDILRVNSEITKAPLSASMIKRYDEHHQDLTLLKALVRQQLPEKYKEIFFDQSKNGYAGYIDGGASQEEFYKFIKPILEKMDGTEELLAKLNREDLLRKQRTFDNGSIPHQIHLGELHAILRRQEDFYPFLKDNREKIEKILTFRIPYYVGPLARGNSRFAWMTRKSEETITPWNFEEVVDKGASAQSFIERMTNFDKNLPNEKVLPKHSLLYEYFTVYNELTKVKYVTEGMRKPAFLSGEQKKAIVDLLFKTNRKVTVKQLKEDYFKKIECFDSVEISGVEDRFNASLGTYHDLLKIIKDKDFLDNEENEDILEDIVLTLTLFEDREMIEERLKTYAHLFDDKVMKQLKRRRYTGWGRLSRKLINGIRDKQSGKTILDFLKSDGFANRNFMQLIHDDSLTFKEDIQKAQVSGQGDSLHEHIANLAGSPAIKKGILQTVKVVDELVKVMGRHKPENIVIEMARENQTTQKGQKNSRERMKRIEEGIKELGSDILKEYPVENTQLQNEKLYLYYLQNGRDMYVDQELDINRLSDYDVDHIVPQSFLKDDSIDNKVLTRSDKNRGKSDNVPSEEVVKKMKNYWRQLLNAKLITQRKFDNLTKAERGGLSELDKAGFIKRQLVETRQITKHVAQILDSRMNTKYDENDKLIREVKVITLKSKLVSDFRKDFQFYKVREINNYHHAHDAYLNAVVGTALIKKYPKLESEFVYGDYKVYDVRKMIAKSEQEIGKATAKYFFYSNIMNFFKTEITLANGEIRKRPLIETNGETGEIVWDKGRDFATVRKVLSMPQVNIVKKTEVQTGGFSKESILPKRNSDKLIARKKDWDPKKYGGFDSPTVAYSVLVVAKVEKGKSKKLKSVKELLGITIMERSSFEKNPIDFLEAKGYKEVRKDLIIKLPKYSLFELENGRKRMLASAGELQKGNELALPSKYVNFLYLASHYEKLKGSPEDNEQKQLFVEQHKHYLDEIIEQISEFSKRVILADANLDKVLSAYNKHRDKPIREQAENIIHLFTLTNLGAPAAFKYFDTTIDRKRYTSTKEVLDATLIHQSITGLYETRIDLSQLGGD

SEQ ID NO: 36 - protein, 1367 aa, Streptococcus pyogenes
MDKKYSIGLDIGTNSVGWAVITDDYKVPSKKFKVLGNTDRHSIKKNLIGALLFDSGETAEATRLKRTARRRYTRRKNRICYLQEIFSNEMAKVDDSFFHRLEESFLVEEDKKHERHPIFGNIVDEVAYHEKYPTIYHLRKKLADSTDKVDLRLIYLALAHMIKFRGHFLIEGDLNPDNSDVDKLFIQLVQTYNQLFEENPINASRVDAKAILSARLSKSRRLENLIAQLPGEKKNGLFGNLIALSLGLTPNFKSNFDLAEDTKLQLSKDTYDDDLDNLLAQIGDQYADLFLAAKNLSDAILLSDILRVNSEITKAPLSASMIKRYDEHHQDLTLLKALVRQQLPEKYKEIFFDQSKNGYAGYIDGGASQEEFYKFIKPILEKMDGTEELLAKLNREDLLRKQRTFDNGSIPYQIHLGELHAILRRQEDFYPFLKDNREKIEKILTFRIPYYVGPLARGNSRFAWMTRKSEETITPWNFEEVVDKGASAQSFIERMTNFDKNLPNEKVLPKHSLLYEYFTVYNELTKVKYVTEGMRKPAFLSGEQKKAIVDLLFKTNRKVTVKQLKEDYFKKIECFDSVEISGVEDRFNTSLGTYHDLLKIIKDKDFLDNEENEDILEDIVLTLTLFEDKEMIEERLKKYANLFDDKVMKQLKRRHYTGWGRLSRKLINGIRDKQSGKTILDFLKSDGFANRNFMQLINDDSLTFKEAIQKAQVSGQGHSLHEQIANLAGSPAIKKGILQTVKIVDELVKVMGHKPENIVIEMARENQTTQKGQKNSRERMKRIEEGIKELGSQILKEHPVENTQLQNEKLYLYYLQNGRDMYVDQELDINRLSDYDVDHIVPQSFLKDDSIDNKVLTRSDKNRGKSDNVPSEEVVKKMKNYWRQLLNAKLITQRKFDNLTKAERGGLSELDKAGFIKRQLVETRQITKHVAQILDSRMNTKYDENDKLIREVKVITLKSKLVSDFRKDFQFYKVREINNYHHAHDAYLNAVVGTALIKKYPKLESEFVYGDYKVYDVRKMIAKSEQEIGKATAKYFFYSNIMNFFKTEITLANGEIRKRPLIETNGETGEIVWDKGRDFATVRKVLSMPQVNIVKKTEVQTGGFSKESILPKRNSDKLIARKKDWDPKKYGGFDSPTVAYSVLVVAKVEKGKSKKLKSVKELLGITIMERSSFEKNPIDFLEAKGYKEVRKDLIIKLPKYSLFELENGRKRMLASAGELQKGNELALPSKYVNFLYLASHYEKLKGSPEDNEQKQLFVEQHKHYLDEIIEQISEFSKRVILADANLDKVLSAYNKHRDKPIREQAKNIIHLFTLTNLGAPAAFKYFDTTIERNRYKSIKEVLDATLIHQSITGLYETRIDLSQLGGD

SEQ ID NO: 37 - protein, 1368 aa, Streptococcus pyogenes
MDKKYSIGLDIGTNSVGWAVITDDYKVPSKKFKVLGNTDRHSIKKNLIGALLFDSGETAEATRLKRTARRRYTRRKNRICYLQEIFSNEMAKVDDSFFHRLEESFLVEEDKKHERHPIFGNIVDEVAYHEKYPTIYHLRKKLADSTDKADLRLIYLALAHMIKFRGHFLIEGDLNPDNSDVDKLFIQLVQTYNQLFEENLINASRVDAKAILSARLSKSRRLENLIAQLPGEKRNGLFGNLIALSLGLTPNFKSNFDLAEDAKLQLSKDTYDDDLDNLLAQIGDQYADLFLAAKNLSDAILLSDILRVNSEITKAPLSASMIKRYDEHHQDLTLLKALVRQQLPEKYKEIFFDQSKNGYAGYIDGGASQEEFYKFIKPILEKMDGTEELLAKLNREDLLRKQRTFDNGSIPHQIHLGELHAILRRQEDFYPFLKDNREKIEKILTFRIPYYVGPLARGNSRFAWMTRKSEETITPWNFEEVVDKGASAQSFIERMTNFDKNLPNEKVLPKHSLLYEYFTVYNELTKVKYVTEGMRKPAFLSGEQKKAIVDLLFKTNRKVTVKQLKEDYFKKIECFDSVEISGVEDRFNASLGTYHDLLKIIKDKDFLDNEENEDILEDIVLTLTLFEDREMIEERLKTYAHLFDDKVMKQLKRRRYTGWGRLSRKLINGIRDKQSGKTILDFLKSDGFANRNFMQLIHDDSLTFKEDIQKAQVSGQGDSLHEHIANLAGSPAIKKGILQTVKIVDELVKVMGRHKPENIVIEMARENQTTQKGQKNSRERMKRIEEGIKELGSDILKEYPVENTQLQNEKLYLYYLQNGRDMYVDQELDINRLSDYDVDHIVPQSFLKDDSIDNKVLTRSDKNRGKSDNVPSEEVVKKMKNYWKQLLNAKLITQRKFDNLTKAERGGLSELDKAGFIKRQLVETRQITKHVAQILDSRMNTKYDENDKLIREVKVITLKSKLVSDFRKDFQFYKVREINNYHHAHDAYLNAVVGTALIKKYPKLESEFVYGDYKVYDVRKMIAKSEQEIGKATAKYFFYSNIMNFFKTEITLANGEIRKRPLIETNGETGEIVWDKGRDFATVRKVLSMPQVNIVKKTEVQTGGFSKESILPKRNSDKLIARKKDWDPKKYGGFDSPTVAYSVLVVAKVEKGKSKKLKSVKELLGITIMERSSFEKNPIDFLEAKGYKEVRKDLIIKLPKYSLFELENGRKRMLASAGELQKGNELALPSKYVNFLYLASHYEKLKGSPEDNEQKQLFVEQHKHYLDEIIEQISEFSKRVILADANLDKVLSAYNKHRDKPIREQAENIIHLFTLTNLGAPAAFKYFDTTIGRNRYKSIKEVLDATLIHQSITGLYETRIDLSQLGGD

SEQ ID NO: 38 - protein, 1279 aa, Streptococcus pyogenes
MAKVDDSFFHRLEESFLVEEDKKHERHPIFGNIVDEVAYHEKYPTIYHLRKKLVDSTDKADLRLIYLALAHMIKFRGHFLIEGDLNPDNSDVDKLFIQLVQTYNQLFEENPINASGVDAKAILSARLSKSRRLENLIAQLPGEKKNGLFGNLIALSLGLTPNFKSNFDLAEDAKLQLSKDTYDDDLDNLLAQIGDQYADLFLAAKNLSDAILLSDILRVNTEITKAPLSASMIKRYDEHHQDLTLLKALVRQQLPEKYKEIFFDQSKNGYAGYIDGGASQEEFYKFIKPILEKMDGTEELLVKLNREDLLRKQRTFDNGSIPHQIHLGELHAILRRQEDFYPFLKDNREKIEKILTFRIPYYVGPLARGNSRFAWMTRKSEETITPWNFEEVVDKGASAQSFIERMTNFDKNLPNEKVLPKHSLLYEYFTVYNELTKVKYVTEGMRKPAFLSGEQKKAIVDLLFKTNRKVTVKQLKEDYFKKIECFDSVEISGVEDRFNASLGTYHDLLKIIKDKDFLDNEENEDILEDIVLTLTLFEDREMIEERLKTYAHLFDDKVMKQLKRRRYTGWGRLSRKLINGIRDKQSGKTILDFLKSDGFANRNFMQLIHDDSLTFKEDIQKAQVSGQGDSLHEHIANLAGSPAIKKGILQTVKVVDELVKVMGRHKPENIVIEMARENQTTQKGQKNSRERMKRIEEGIKELGSQILKEHPVENTQLQNEKLYLYYLQNGRDMYVDQELDINRLSDYDVDHIVPQSFLKDDSIDNKVLTRSDKNRGKSDNVPSEEVVKKMKNYWRQLLNAKLITQRKFDNLTKAERGGLSELDKAGFIKRQLVETRQITKHVAQILDSRMNTKYDENDKLIREVKVITLKSKLVSDFRKDFQFYKVREINNYHHAHDAYLNAVVGTALIKKYPKLESEFVYGDYKVYDVRKMIAKSEQEIGKATAKYFFYSNIMNFFKTEITLANGEIRKRPLIETNGETGEIVWDKGRDFATVRKVLSMPQVNIVKKTEVQTGGFSKESILPKRNSDKLIARKKDWDPKKYGGFDSPTVAYSVLVVAKVEKGKSKKLKSVKELLGITIMERSSFEKNPIDFLEAKGYKEVKKDLIIKLPKYSLFELENGRKRMLASAGELQKGNELALPSKYVNFLYLASHYEKLKGSPEDNEQKQLFVEQHKHYLDEIIEQISEFSKRVILADANLDKVLSAYNKHRDKPIREQAENIIHLFTLTNLGAPAAFKYFDTTIDRKRYTSTKEVLDATLIHQSITGLYETRIDLSQLGGD

SEQ ID NO: 39 - protein, 543 aa, Streptococcus pyogenes
QELDINRLSGYDVDHIVPQSFLKDDSIDNKVLTRSDKNRGKSDNVPSEEVVKKMKNYWRQLLNAKLITQRKFDNLTKAERGGLSELDKVGFIKRQLVETRQITKHVAQILDSRMNTKYDENDKLIREVRVITLKSKLVSDFRKDFQFYKVREINNYHHAHDAYLNAVVGTALIKKYPKLESEFVYGDYKVYDVRKMIAKSEQEIGKATAKYFFYSNIMNFFKTEITLANGEIRKRPLIETNGETGEIVWDKGRDFATVRKVLSMPQVNIVKKTEVQTGGFSKESILPKRNSDKLIARKKDWDPKKYGGFDSPTVAYSVLVVAKVEKGKSKKLKSVKELLGITIMERSSFEKDPIDFLEAKGYKEVRKDLIIKLPKYSLFELENGRKRMLASAGELQKGNELALPSKYVNFLYLASHYEKLKGSPEDNEQKQLFVEQHKHYLDEIIEQISEFSKRVILADANLDKVLSAYNKHRDKPIREQAENIIHLFTLTNLGAPAAFKYFDTTIDRKRYTSTKEVLDATLIHQSITGLYETRIDLSQLGGD

SEQ ID NO: 40 - protein, 306 aa, Streptococcus pyogenes
IETNGETGEIVWDKGRDFATVRKVLSMPQVNIVKKTEVQTGGFSKESILPKRNSDKLIARKKDWDPKKYGGFDSPTVAYSVLVVAKVEKGKSKKLKSVKELLGITIMERSSFEKDPIDFLEAKGYKEVRKDLIIKLPKYSLFELENGRKRMLASAGELQKGNELALPSKYVNFLYLASHYEKLKGSPEDNEQKQLFVEQHKHYLDEIIEQISEFSKRVILADANLDKVLSAYNKHRDKPIREQAENIIHLFTLTNLGAPAAFKYFDTTIDRKRYTSTKEVLDATLIHQSITGLYETRIDLSQLGGD

SEQ ID NO: 41 - protein, 1368 aa, Streptococcus pyogenes
MDKKYSIGLDIGTNSVGWAVITDDYKVPSKKFKVLGNTDRHSIKKNLIGALLFDSGEIAEATRLKRTARRRYTRRKNRICYLQEIFSNEMAKVDDSFFHRLEESFLVEEDKKHERHPIFGNIVDEVAYHEKYPTIYHLRKKLVDSTDKADLRLIYLALAHMIKFRGHFLIEGDLNPDNSDVDKLFIQLVQTYNQLFEENPINASGVDAKAILSARLSKSRRLENLIAQLPGEKKNGLFGNLIALSLGLTPNFKSNFDLAEDAKLQLSKDTYDDDLDNLLAQIGDQYADLFLAAKNLSDAILLSDILRLNSEITKAPLSASMIKRYDEHHQDLTLLKALVRQQLPEKYKEIFFDQSKNGYAGYIDGGASQEEFYKFIKPILEKMDGTEELLAKLNREDLLRKQRTFDNGSIPHQIHLGELHAILRRQEDFYPFLKDNREKIEKILTFRIPYYVGPLARGNSRFAWMTRKSEETITPWNFEEVVDKGASAQSFIERMTNFDKNLPNEKVLPKHSLLYEYFTVYNELTKVKYVTEGMRKPAFLSGEQKKAIVDLLFKTNRKVTVKQLKEDYFKKIECFDSVEISGVEDRFNASLGTYHDLLKIIKDKDFLDNEENEDILEDIVLTLTLFEDREMIEERLKTYAHLFDDKVMKQLKRRRYTGWGRLSRKLINGIRDKQSGKTILDFLKSDGFANRNFMQLIHDDSLTFKEDIQKAQVSGQGDSLHEHIANLAGSPAIKKGILQTVKVVDELVKVMGRHKPENIVIEMARENQTTQKGQKNSRERMKRIEEGIKELGSQILKEHPVENTQLQNEKLYLYYLQNGRDMYVDQELDINRLSDYDVDHIVPQSFIKDDSIDNKVLTRSDKNRGKSDNVPSEEVVKKMKNYWRQLLNAKLITQRKFDNLTKAERGGLSELDKAGFIKRQLVETRQITKHVAQILDSRMNTKYDENDKLIREVKVITLKSKLVSDFRKDFQFYKVREINNYHHAHDAYLNAVVGTALIKKYPKLESEFVYGDYKVYDVRKMLAKSEQEIGKATAKYFFYSNIMNFFKTEITLANGEIRKRPLIETNGETGEIVWDKGRDFATVRKVLSMPQVNIVKKTEVQTGGFSKESILPKRNSDKLIARKKDWDPKKYGGFDSPTVAYSVLVVAKVEKGKSKKLKSVKELLGITIMERSSFEKNPIDFLEAKGYKEVRKDLIIKLPKYSLFELENGRKRMLASAGELQKGNELALPSKYVNFLYLASHYEKLKGSPEDNEQKQLFVEQHKHYLDEIIEQISEFSKRVILADANLDKVLSAYNKHRDKPIREQAENIIHLFTLTNLGAPTAFKYFDTTIDRKRYTSTKEVLDATFIHQSITGLYETRIDLSQLGGD

SEQ ID NO: 42 - protein, 1345 aa, Streptococcus sp.
MDQKYSIGLDIGTNSVGWAVVTDDYKVPAKKMKVLGNTDKQSIKKNLLGALLFDSGETAEATRLKRTARRRYTRRRNRLRYLQEIFAEEMNKVDENFFQRLDDSFLVDEDKRGERHPIFGNIAAEVKYHDDFPTIYHLRKHLADISQKADLRLVYLALAHMIKFRGHFLIEGQLKAENTNVQALFKDFVEVYDKTVEESHLSEMTVDALSILTEKVSKSRRLENLIAHYPAEKKNTLFGNLIALSLGLQPNFKTNFQLSEDAKLQFSKDTYEEDLEGLLGEIGDEYADLFASAKNLYDAILLSGILTVDDNSTKAPLSASMVKRYEEHQKDLKKLKDFIKVNAPDQYNAIFKDKNKKGYAGYIENGVKQDEFYKYLKGILLQINGSGDFLDKIDREDFLRKQRTFDNGSIPHQIHLQEMHAILRRQEEHYPFLKENQDKIEKILTFRIPYYVGPLARKGSRFAWAEYKADEKITPWNFDDILDKEKSAEKFITRMTLNDLYLPEEKVLPKHSLLYETFTVYNELTKVKYVNEQGEAKFFDANMKQEIFDHVFKENRKVTKDKLLNYLNKEFEEFRIVNLTGLDKENKAFNSSLGTYHDLRKILDKSFLDDKANEKTIEDIIQTLTLFEDREMIRQRLQKYSDIFTKAQLKKLERRHYTGWGRLSYKLINGIRNKENKKTILDYLIDDGYANRNFMQLINDDALSFKEEIARAQIIGDVDDIANVVHDLPGSPAIKKGILQSVKIVDELVKVMGHNPANIIIEMARENQMTDKGRRNSQQRLKLLQDSLKNLDNPVNIKNVENQQLQNDRLFLYYIQNGKDMYTGETLDINNLSQYDIDHIIPQAFIKDNSLDNRVLTRSDKNRGKSDDVPSIEVVHEMKSFWSKLLSVKLITQRKFDNLTKAERGGLTEEDKAGFIKRQLVETRQITKHVAQILDERFNTEFDGNKRRIRNVKIITLKSNLVSNFRKEFELYKVREINDYHHAHDAYLNAVVGNALLLKYPQLEPEFVYGEYPKYNSYRSRKSATEKFLFYSNILRFFKKEDIQTNEDGEIAWNKEKHIKILRKVLSYPQVNIVKKTEEQTGGFSKESILPKGESDKLIPRKTKNSYWNPKKYGGFDSPVVAYSILVFADVEKGKSKKLRKVQDMVGITIMEKKRFEKHPVDFLEQRGYRNVRLEKIIKLPKYSLFELENKRRRLLASARELQKGNELVIPQRFTTLLYHSYQIEKNYEPEHREYVEKHKDEFKELLEYISVFSRKYVLADNNLTKIEMLFSKNKDAEVSSLAKSFISLLTFTAFGAPAAFNFFGENIDRKRYTSVTECLNATLIHQSITGLYETRIDLSKLGED

SEQ ID NO: 43 - protein, 1373 aa, Streptococcus sp.
MTKKNYSIGLDIGTNSVGWAVITDDYKVPAKKMKVLGNTDKKYIKKNLLGALLFDSGETAEATRLKRTARRRYTRRKNRLRYLQEIFAEEMTKVDESFFQRLDESFLRWDDDNKKLGRYPIFGNKADVVKYHQEFPTIYHLRKHLADSSEKADLRLVYLALAHMIKFRGHFLIEGELNAENTDVQKIFADFVGVYDRTFDDSHLSEITVDAASILTEKISKSRRLENLIKYYPTEKKNTLFGNLIALALGLQPNFKMNFKLSEDAKLQFSKDSYEEDLGELLGKIGDDYADLFTSAKNLYDAILLSGILIVDDNSTKAPLSASMIKRYVEHQEDLEKLKEFIKANKSELYHDIFKDKNKNGYAGYIENGVKQDEFYKYLKNTLSKIAGSDYFLDKIEREDFLRKQRTFDNGSIPHQIHLQEMHAILRRQGDYYPFLKENQDRIEKILTFRIPYYVGPLARKDSRFSWAEYHSDEKITPWNFDKVIDKEKSAEKFITRMTLNDLYLPEEKVLPKHSHVYETYAVYNELTKIKYVNEQGKDSFFDSNMKQEIFDHVFKENRKVTKEKLLNYLNKEFPEYRIKDLIGLDKENKSFNASLGTYHDLKKILDKAFLDDKVNEEVIEDIIKTLTLFEDKDMIHERLQKYSDIFTADQLKKLERRHYTGWGRLSYKLINGIRNKENNKTILDYLIDDGSANRNFMQLINDDTLPFKQIIQKSQVVGDVDDIEAVVHDLPGSPAIKKGILQSVKIVDELVKVMGDNPDNIVIEMARENQTTNRGRSQSQQRLKKLQNSLKELGSNILNEEKPSYIEDKVENSHLQNDQLFLYYIQNGKDMYTGDELDIDHLSDYDIDHIIPQAFIKDDSIDNRVLTSSAKNRGKSDDVPSLDIVRARKAEWVRLYKSGLISKRKFDNLTKAERGGLTEADKAGFIKRQLVETRQITKHVAQILDARFNTESDENDKVIRDVKVITLKSNLVSQFRKDFEFYKVREINDYHHAHDAYLNAVVGTALLKKYPKLASEFVYGEYKKYDIRKFITNSSDKATAKYFFYSNLMNFFKRVIRYSNGKVIVRPVVEYSKDTEDIAWDKKSNFRTICKVLSYPQVNIVKKVETQTGGFSKESILPKGDSDKLIPRKTKKAYWDTKKYGGFDSPTVAYSVFVVADVEKGKAKKLKTVKELVGISIMERSFFEENPVEFLENKGYHNIREDKLIKLPKYSLFEFEGGKRRLLASASELQKGNEMVIPGHLVKLLYHAQRINSFNSTKYLDYVSAHKKEFEKVLSCVEDFANLYVDVEKNLSKIRAVADSMDNFSIEEISNSFINLLTLTALGAPADFNFLGEKIPRKRYTSTKECLNATLIHQSITGLYETRIDLSKIGEE

SEQ ID NO: 44 - protein, 1370 aa, Streptococcus agalactiae
MNKPYSIGLDIGTNSVGWSIITDDYKVPAKKIRVLGNTDKEYIKKNLIGALLFDGGNTAADRRLKRTARRRYTRRRNRILYLQEIFAEEMSKVDDSFFHRLEDSFLVEEDKRGSKYPIFATLQEEKYYHEKFPTIYHLRKELADKKEKADLRLVYLALAHIIKFRGHFLIEDDRFDVRNTDIQKQYQAFLEIFDTTFENNDLLSQDVDVEAILTDKISKSAKKDRILAQYPNQKSTGIFAEFLKLIVGNQADFKKHFNLEDKTPLQFAKDSYDEDLENLLGQIGDEFADLFSAAKKLYDSVLLSGILTVTDLSTKAPLSASMIQRYDEHREDLKQLKQFVKASLPEKYQEIVADSSKDGYAGYIEGKTNQEAFYKYLSKLLTKQEGSEYFLEKIKNEDFLRKQRTFDNGSIPHQVHLTELRAIIRRQSEYYPFLKENLDRIEKILTFRIPYYVGPLAREKSDFAWMTRKTDDSIRPWNFEDLVDKEKSAEAFIHRMTNNDLYLPEEKVLPKHSLIYEKFTVYNELTKVRFLAEGFKDFQFLNRKQKETIFNSLFKEKRKVTEKDIISFLNKVDGYEGIAIKGIEKQFNASLSTYHDLKKILGKDFLDNTDNELILEDIVQTLTLFEDREMIKKRLDIYKDFFTESQLKKLYRRHYTGWGRLSAKLINGIRNKENQKTILDYLIDDGSANRNFMQLIKDAGLSFKPIIDKARTGSHSDNLKEVIGELAGSPAIKKGILQSLKIVDELVKVMGYEPEQIVVEMARENQTTAKGLSRSRQRLTTLRESLANLKSNILEEKKPKYVKDQVENHHLSDDRLFLYYLQNGKDMYTDDELDIDNLSQYDIDHIIPQAFIKDDSIDNRVLVSSAKNRGKSDDVPSLEIVKDCKVFWKKLLDAKLMSQRKYDNLTKAERGGLTSDDKARFIQRQLVETRQITKHVARILDERFNNELDSKGRRIRKVKIVTLKSNLVSNFRKEFVFYKIREVNNYHHAHDAYLNAVVAKAILTKYPQLEPEFVYGDYPKYNSYKTRKSATEKLFFYSNIMNFFKTKVTLADGTVVVKDDIEVNNDTGEIVWDKKKHFATVRKVLSYPQVNIVKKTEIQTGGFSKESILAHGNSDKLIPRKTKDIYLDPKKYGGFDSPIVAYSVLVVADIKKGKAQKLKTVTELLGITIMERSRFEKNPSAFLESKGYLNIRTDKLIILPKYSLFELENGRRRLLASAGELQKGNELALPTQFMKFLYLASRYNESKGKPEEIEKKQEFVNQHVSYFDDIFQIINDFSKRVILADANLEKINRLYQDNKENIPVDELANNIINLFTFTSLGAPAAFKFFDKIVDRKRYTSTKEVLNSTLIHQSITGLYETRIDLGKLGED

SEQ ID NO: 45 - protein, 1378 aa, Streptococcus agalactiae
MNKPYSIGLDIGTNSVGWSIITDDYKVPAKKMRVLGNTDKEYIKKNLIGALLFDGGNTAADRRLKRTARRRYTRRRNRILYLQEIFAEEMSKVDDSFFHRLEDSFLVEEDKRGSKYPIFATLQEEKDYHEKFPTIYHLRKELADKQEKADLRLIYLALAHIIKFRGHFLIEDDRFDVRNTDIQKQYQAFLEIFDTTFENNHLLSQNVDVEAILTDKISKSAKKDRILAQYPNQKSTGIFAEFLKLIVGNQADFKKHFNLEDKTPLQFAKDSYDEDLENLLGQIGDEFADLFSAAKKLYDSVLLSGILTVIDLSTKAPLSASMIQRYDEHREDLKQLKQFVKASLPEKYQEIFADSSKDGYAGYIEGKTNQEAFYKYLSKLLTKQEDSENFLEKIKNEDFLRKQRTFDNGSIPHQVHLTELKAIIRRQSEYYPFLKENQDRIEKILTFRIPYYIGPLAREKSDFAWMTRKTDDSIRPWNFEDLVDKEKSAEAFIHRMTNNDFYLPEEKVLPKHSLIYEKFTVYNELTKVRYKNEQGETYFFDSNIKQEIFDGVFKEHRKVSKKKLLDFLAKEYEEFRIVDVIGLDKENKAFNASLGTYHDLEKILDKDFLDNPDNESILEDIVQTLTLFEDREMIKKRLENYKDLFTESQLKKLYRRHYTGWGRLSAKLINGIRDKESQKTILDYLIDDGRSNRNFMQLINDDGLSFKSIISKAQAGSHSDNLKEVVGELAGSPAIKKGILQSLKIVDELVKVMGYEPEQIVVEMARENQTTNQGRRNSRQRYKLLDDGVKNLASDLNGNILKEYPTDNQALQNERLFLYYLQNGRDMYTGEALDIDNLSQYDIDHIIPQAFIKDDSIDNRVLVSSAKNRGKSDDVPSLEIVKDCKVFWKKLLDAKLMSQRKYDNLTKAERGGLTSDDKARFIQRQLVETRQITKHVARILDERFNNELDSKGRRIRKVKIVTLKSNLVSNFRKEFGFYKIREVNDYHHAHDAYLNAVVAKAILTKYPQLEPEFVYGLYRRKKLSKIVREDKEEKYSEATRKMFFYSNLMNMFKRVVRLADGSIVVRPVIETGRYMGKTAWDKKKHFATVRKVLSYPQVNIVKKTEIQTGGFSKESILAHGNSDKLIPRKTKDIYLDPKKYGGFDSPIVAYSVLVVADIKKGKAQKLKTVTELLGITIMERSKFEKNPSAFLESKGYLNIRDDKLMILPKYSLFELENGRRRLLASAGELQKGNELALPTQFMKFLYLASRYNESKGKPEEIEKKQEFVNQHVSYFDDILQLINDFSKRVILADANLEKINKLYQDNKENISVDELANNIINLFTFTSLGAPAAFKFFDKIVDRKRYTSTKEVLNSTLIHQSITGLYETRIDLSKLGED

SEQ ID NO: 46 - protein, 1370 aa, Streptococcus agalactiae
MNKPYSIGLDIGTNSVGWSIITDDYKVPAKKMRVLGNTDKEYIKKNLIGALLFDGGNTAADRRLKRTARRRYTRRRNRILYLQEIFAEEMSKVDDSFFHRLEDSFLVEEDKRGSKYPIFATLQEEKDYHEKFSTIYHLRKELADKKEKADLRLIYIALAHIIKFRGHFLIEDDSFDVRNTDISKQYQDFLEIFNITFENNDLLSQNVDVEAILTDKISKSAKKDRILAQYPNQKSTGIFAEFLKLIVGNQADFKKYFNLEDKTPLQFAKDSYDEDLENLLGQIGDEFADLFSAAKKLYDSVLLSGILTVIDLSTKAPLSASMIQRYDEHREDLKQLKQFVKASLPEKYQEIFADSSKDGYAGYIEGKTNQEAFYKYLSKLLTKQEDSENFLEKIKNEDFLRKQRTFDNGSIPHQVHLTELKAIIRRQSEYYPFLKENQDRIEKILTFRIPYYIGPLAREKSDFAWMTRKTDDSIRPWNFEDLVDKEKSAEAFIHRMTNNDFYLPEEKVLPKHSLIYEKFTVYNELTKVRYKNEQGETYFFDSNIKQEIFDGVFKEHRKVSKKKLLDFLAKEYEEFRIVDVIGLDKENKAFNASLGTYHDLEKILDKDFLDNPDNESILEDIVQTLTLFEDREMIKKRLENYKDLFTESQLKKLYRRHYTGWGRLSAKLINGIRDKESQKTILDYLIDDGRSNRNFMQLINDDGLSFKSIISKAQAGSHSDNLKEVVGELAGSPAIKKGILQSLKIVDELVKVMGYEPEQIVVEMARENQTTNQGRRNSRQRYKLLDDGVKNLASDLNGNILKEYPTDNQALQNERLFLYYLQNGRDMYTGEALDIDNLSQYDIDHIIPQAFIKDDSIDNRVLVSSAKNRGKSDDVPSLEIVKDCKVFWKKLLDAKLMSQRKYDNLTKAERGGLTSDDKARFIQRQLVETRQITKHVARILDERFNNELDSKGRRIRKVKIVTLKSNLVSNFRKEFGFYKIREVNNYHHAHDAYLNAVVAKAILTKYPQLEPEFVYGDYPKYNSYKTRKSATEKLFFYSNIMNFFKTKVTLADGTVVVKDDIEVNNDTGEIVWDKKKHFATVRKVLSYPQNNIVKKTEIQTGGFSKESILAHGNSDKLIPRKTKDIYLDPKKYGGFDSPIVAYSVLVVADIKKGKAQKLKTVTELLGITIMERSRFEKNPSAFLESKGYLNIRADKLIILPKYSLFELENGRRRLLASAGELQKGNELALPTQFMKFLYLASRYNESKGKPEEIEKKQEFVNQHVSYFDDILQLINDFSKRVILADANLEKINKLYQDNKENISVDELANNIINLFTFTSLGAPAAFKFFDKIVDRKRYTSTKEVLNSTLIHQSITGLYETRIDLGKLGED

SEQ ID NO: 47 - protein, 1370 aa, Streptococcus agalactiae
MNKPYSIGLDIGTNSVGWSIITDDYKVPAKKMRVLGNTDKEYIKKNLIGALLFDGGNTAADRRLKRTARRRYTRRRNRILYLQEIFAEEMSKVDDSFFHRLEDSFLVEEDKRGSKYPIFATLQEEKDYHEKFSTIYHLRKELADKKEKADLRLIYIALAHIIKFRGHFLIEDDSFDVRNTDISKQYQDFLEIFNTIFENNDLLSQNVDVEAILTDKISKSAKKDRILAQYPNQKSTGIFAEFLKLIVGNQADFKKYFNLEDKTPLQFAKDSYDEDLENLLGQIGDEFADLFSAAKKLYDSVLLSGILTVIDLSTKAPLSASMIQRYDEHREDLKQLKQFVKASLPEKYQEIFADSSKDGYAGYIEGKTNQEAFYKYLSKLLTKQEDSENFLEKIKNEDFLRKQRTFDNGSIPHQVHLTELKAIIRRQSEYYPFLKENQDRIEKILTFRIPYYIGPLAREKSDFAWMTRKTDDSIRPWNFEDLVDKEKSAEAFIHRMTNNDFYLPEEKVLPKHSLIYEKFTVYNELTKVRYKNEQGETYFFDSNIKQEIFDGVFKEHRKVSKKKLLDFLAKEYEEFRIVDVIGLDKENKAFNASLGTYHDLEKILDKDFLDNPDNESILEDIVQTLTLFEDREMIKKRLENYKDLFTESQLKKLYRRHYTGWGRLSAKLINGIRDKESQKTILDYLIDDGRSNRNFMQLINDDGLSFKSIISKAQAGSHSDNLKEVVGELAGSPAIKKGILQSLKIVDELVKVMGYEPEQIVVEMARENQTTNQGRRNSRQRYKLLDDGVKNLASDLNGNILKEYPTDNQALQNERLFLYYLQNGRDMYTGEALDIDNLSQYDIDHIIPQAFIKDDSIDNRVLVSSAKNRGKSDDVPSLEIVKDCKVFWKKLLDAKLMSQRKYDNLTKAERGGLTSDDKARFIQRQLVETRQITKHVARILDERFNNELDSKGRRIRKVKIVTLKSNLVSNFRKEFGFYKIREVNNYHHAHDAYLNAVVAKAILTKYPQLEPEFVYGDYPKYNSYKTRKSATEKLFFYSNIMNFFKTKVTLADGTVVVKDDIEVNNDTGEIVWDKKKHFATVRKVLSYPQNNIVKKTEIQTGGFSKESILAHGNSDKLIPRKTKDIYLDPKKYGGFDSPIVAYSVLVVADIKKGKAQKLKTVTELLGITIMERSRFEKNPSAFLESKGYLNIRADKLIILPKYSLFELENGRRRLLASAGELQKGNELALPTQFMKFLYLASRYNESKGKPEEIEKKQEFVNQHVSYFDDILQLINDFSKRVILADANLEKINKLYQDNKENISVDELANNIINLFTFTSLGAPAAFKFFDKIVDRKRYTSTKEVLNSTLIHQSITGLYETRIDLGKLGED

SEQ ID NO: 48 - protein, 1370 aa, Streptococcus agalactiae
MNKPYSIGLDIGTNSVGWSIITDDYKVPAKKMRVLGNTDKEYIKKNLIGALLFDGGNTAADRRLKRTARRRYTRRRNRILYLQEIFAEEMSKVDDSFFHRLEDSFLVEEDKRGSKYPIFATLQEEKDYHEKFSTIYHLRKELADKKEKADLRLIYIALAHIIKFRGHFLIEDDSFDVRNTDISKQYQDFLEIFNTTFENNDLLSQNVDVEAILTDKISKSAKKDRILAQYPNQKSTGIFAEFLKLIVGNQADFKKYFNLEDKTPLQFAKDSYDEDLENLLGQIGDEFADLFSAAKKLYDSVLLSGILTVIDLSTKAPLSASMIQRYDEHREDLKQLKQFVKASLPEKYQEIFADSSKDGYAGYIEGKTNQEAFYKYLSKLLTKQEDSENFLEKIKNEDFLRKQRTFDNGSIPHQVHLTELKAIIRRQSEYYPFLKENQDRIEKILTFRIPYYIGPLAREKSDFAWMTRKTDDSIRPWNFEDLVDKEKSAEAFIHRMTNNDFYLPEEKVLPKHSLIYEKFTVYNELTKVRYKNEQGETYFFDSNIKQEIFDGVFKEHRKVSKKKLLDFLAKEYEEFRIVDVIGLDKENKAFNASLGTYHDLEKILDKDFLDNPDNESILEDIIQTLTLFEDREMIKKRLENYKDLFTESQLKKLYRRHYTGWGRLSAKLINGIRDKESQKTILDYLIDDGRSNRNFMQLINDDGLSFKSIISKAQAGSHSDNLKEVVGELAGSPAIKKGILQSLKIVDELVKVMGYEPEQIVVEMARENQTTNQGRRNSRQRYKLLDDGVKNLASDLNGNILKEYPTDNQALQNERLFLYYLQNGRDMYTGEALDIDNLSQYDIDHIIPQAFIKDDSIDNRVLVSSAKNRGKSDDVPSLEIVKDCKVFWKKLLDAKLMSQRKYDNLTKAERGGLTSDDKARFIQRQLVETRQITKHVARILDERFNNELDSKGRRIRKVKIVTLKSNLVSNFRKEFGFYKIREVNNYHHAHDAYLNAVVAKAILTKYPQLEPEFVYGDYPKYNSYKTRKSATEKLFFYSNIMNFFKTKVTLADGTVVVKDDIEVNNDTGEIVWDKKKHFATVRKVLSYPQNNIVKKTEIQTGGFSKESILAHGNSDKLIPRKTKDIYLDPKKYGGFDSPIVAYSVLVVADIKKGKAQKLKTVTELLGITIMERSRFEKNPSAFLESKGYLNIRADKLIILPKYSLFELENGRRRLLASAGELQKGNELALPTQFMKFLYLASRYNESKGKPEEIEKKQEFVNQHVSYFDDILQLINDFSKRVILADANLEKINKLYQDNKENISVDELANNIINLFTFTSLGAPAAFKFFDKIVDRKRYTSTKEVLNSTLIHQSITGLYETRIDLGKLGED

SEQ ID NO: 49 - protein, 1370 aa, Streptococcus agalactiae
MNKPYSIGLDIGTNSVGWSIITDDYKVPAKKMRVLGNTDKEYIKKNLIGALLFDGGNTAADRRLKRTARRRYTRRRNRILYLQEIFAEEMSKVDDSFFHRLEDSFLVEEDKRGSKYPIFATLQEEKDYHEKFSTIYHLRKELADKKEKADLRLIYIALAHIIKFRGHFLIEDDSFDVRNTDISKQYQDFLEIFNTTFENNDLLSQNVDVEAILTDKISKSAKKDRILAQYPNQKSTGIFAEFLKLIVGNQADFKKYFNLEDKTPLQFAKDSYDEDLENLLGQIGDEFADLFSAAKKLYDSVLLSGILTVIDLSTKAPLSASMIQRYDEHREDLKQLKQFVKASLPEKYQEIFADSSKDGYAGYIEGKTNQEAFYKYLSKLLTKQEDSENFLEKIKNEDFLRKQRTFDNGSIPHQVHLTELKAIIRRQSEYYPFLKENQDRIEKILTFRIPYYIGPLAREKSDFAWMTRKTDDSIRPWNFEDLVDKEKSAEAFIHRMTNNDFYLPEEKVLPKHSLIYEKFTVYNELTKVRYKNEQGETYFFDSNIKQEIFDGVFKEHRKVSKKKLLDFLAKEYEEFRIVDVIGLDKENKAFNASLGTYHDLEKILDKDFLDNPDNESILEDIVQTLTLFEDREMIKKRLENYKDLFTESQLKKLYRRHYTGWGRLSAKLINGIRDKESQKTILDYLIDDGRSNRNFMQLINDDGLSFKSIISKAQAGSHSDNLKEVVGELAGSPAIKKGILQSLKIVDELVKVMGYEPEQIVVEMARENQTTNQGRRNSRQRYKLLDDGVKNLASDLNGNILKEYPTDNQALQNERLFLYYLQNGRDMYTGEALDIDDLSQYDIDHIIPQAFIKDDSIDNRVLVSSAKNRGKSDDVPSLEIVKDCKVFWKKLLDAKLMSQRKYDNLTKAERGGLTSDDKARFIQRQLVETRQITKHVARILDERFNNELDSKGRRIRKVKIVTLKSNLVSNFRKEFGFYKIREVNNYHHAHDAYLNAVVAKAILTKYPQLEPEFVYGDYPKYNSYKTRKSATEKLFFYSNIMNFFKTKVTLADGTVVVKDDIEVNNDTGEIVWDKKKHFATVRKVLSYPQNNIVKKTEIQTGGFSKESILAHGNSDKLIPRKTKDIYLDPKKYGGFDSPIVAYSVLVVADIKKGKAQKLKTVTELLGITIMERSRFEKNPSAFLESKGYLNIRADKLIILPKYSLFELENGRRRLLASAGELQKGNELALPTQFMKFLYLASRYNESKGKPEEIEKKQEFVNQHVSYFDDILQLINDFSKRVILADANLEKINKLYQDNKENISVDELANNIINLFTFTSLGAPAAFKFFDKIVDRKRYTSTKEVLNSTLIHQSITGLYETRIDLGKLGED

SEQ ID NO: 50 - protein, 1370 aa, Streptococcus sp.
MNKPYSIGLDIGTNSVGWSIITDDYKVPAKKMRVLGNTDKEYIKKNLIGALLFDGGNTAADRRLKRTARRRYTRRRNRILYLQEIFAEEMSKVDDSFFHRLEDSFLVEEDKRGSKYPIFATLQEEKDYHEKFSTIYHLRKELADKKEKADLRLIYIALAHIIKFRGHFLIEDDSFDVRNTDISKQYQDFLEIFNTTFENNDLLSQNVDVEAILTDKISKSAKKDRILAQYPNQKSTGIFAEFLKLIVGNQADFKKYFNLEDKTPLQFAKDSYDEDLENLLGQIGDEFADLFSAAKKLYDSVLLSGILTVIDLSTKAPLSASMIQRYDEHREDLKQLKQFVKASLPEKYQEIFADSSKDGYAGYIEGKTNQEAFYKYLSKLLTKQEDSENFLEKIKNEDFLRKQRTFDNGSIPHQVHLTELKAIIRRQSEYYPFLKENQDRIEKILTFRIPYYIGPLAREKSDFAWMTRKTDDSIRPWNFEDLVDKEKSAEAFIHRMTNNDFYLPEEKVLPKHSLIYEKFTVYNELTKVRYKNEQGETYFFDSNIKQEIFDGVFKEHRKVSKKKLLDFLAKEYEEFRIVDVIGLDKENKAFNASLGTYHDLEKILDKDFLDNPDNESILEDIVQTLTLFEDREMIKKRLENYKDLFTESQLKKLYRRHYTGWGRLSAKLINGIRDKESQKTILDYLIDDGRSNRNFMQLINDDGLSFKSIISKAQAGSHSDNLKEVVGELAGSPAIKKGILQSLKIVDELVKVMGYEPEQIVVEMARENQTTNQGRRNSRQRYKLLDDGVKNLASDLNGNILKEYPTDNQALQNERLFLYYLQNGRDMYTGEALDIDNLSQYDIDHIIPQAFIKDDSIDNRVLVSSAKNRGKSDDVPSLEIVKDCKVFWKKLLDAKLMSQRKYDNLTKAERGGLTSDDKARFIQRQLVETRQITKHVARILDERFNNELDSKGRRIRKVKIVTLKSNLVSNFRKEFGFYKIREVNNYHHAHDAYLNAVVAKAILTKYPQLEPEFVYGDYPKYNSYKTRKSATEKLFFYSNIMNFFKTKVTLADGTVVVKDDIEVNNDTGEIVWDKKKHFATVRKVLSYPQNNIVKKTEIQTGGFSKESILAHGNSDKLIPRKTKDIYLDPKKYGGFDSPIVAYSVLVVADIKKGKAQKLKTVTELLGITIMERSRFEKNPSAFLESKGYLNIRADKLIILPKYSLFELENGRRRLLASAGELQKGNELALPTQFMKFLYLASRYNESKGKPEEIEKKQEFVNQHVSYFDDILQLINDFSKRVILADANLEKINKLYQDNKENISVDELANNIINLFTFTSLGAPAAFKFFDKIVDRKRYTSTKEVLNSTLIHQSITGLYETRIDLGKLGED

SEQ ID NO: 51 - protein, 1370 aa, Streptococcus agalactiae
MNKPYSIGLDIGTNSVGWSIITDDYKVPAKKMRVLGNTDKEYIKKNLIGALLFDGGNTAADRRLKRTARRRYTRRRNRILYLQEIFAEEMSKVDDSFFHRLEDSFLVEEDKRGSKYPIFATLQEEKDYHEKFSTIYHLRKELADKKEKADLRLIYIALAHIIKFRGHFLIEDDSFDVRNTDISKQYQDFLEIFNTTFENNDLLSQNVDVEAILTDKISKSAKKDRILAQYPNQKSTGIFAEFLKLIVGNQADFKKYFNLEDKTPLQFAKDSYDEDLENLLGQIGDEFADLFSAAKKLYDSVLLSGILTVIDLSTKAPLSASMIQRYDEHREDLKQLKQFVKASLPEKYQEIFADSSKDGYAGYIEGKTNQEAFYKYLSKLLTKQEDSENFLEKIKNEDFLRKQRTFDNGSIPHQVHLTELKAIIRRQSEYYPFLKENQDRIEKILTFRIPYYIGPLAREKSDFAWMTRKTDDSIRPWNFEDLVDKEKSAEAFIHRMTNNDFYLPEEKVLPKHSLIYEKFTVYNELTKVRYKNEQGETYFFDSNIKQEIFDGVFKEHRKVSKKKLLDFLAKEYEEFRIVDVIGLDKENKAFNASLGTYHDLEKILDKDFLDNPDNESILEDIVQTLTLFEDREMIKKRLENYKDLFTESQLKKLYRRHYTGWGRLSAKLINGIRDKESQKTILDYLIDDGRSNRNFMQLINDDGLSFKSIISKAQAGSHSDNLKEVVGELAGSPAIKKGILQSLKIVDELVKVMGYEPEQIVVEMARENQTTNQGRRNSRQRYKLLDDGVKNLASDLNGNILKEYPTDNQALQNERLFLYYLQNGRDMYTGEALDIDNLSQYDIDHIIPQAFIKDDSIDNRVLVSSAKNRGKSDDVPSLEIVKDCKVFWKKLLDAKLMSQRKYDNLTKAERGGLTSDDKARFIQRQLVETRQITKHVARILDERFNNELDSKGRRIRKVKIVTLKSNLVSNFRKEFGFYKIREVNNYHHAHDAYLNAVVAKAILTKYPQLEPEFVYGDYPKYNSYKTRKSATEKLFFYSNIMNFFKTKVTLADGTVVVKDDIEVNNDTGEIVWDKKKHFATVRKVLSYPQNNIVKKTEIQTGGFSKESILAHGNSDKLIPRKTKDIYLDPKKYGGFDSPIVAYSVLVVADIKKGKAQKLKTVTELLGITIMERSRFEKNPSAFLESKGYLNIRADKLIILPKYSLFELENGRRRLLASAGELQKGNELALPTQFMKFLYLASRYNESKGKPEEIEKKQEFVNQHVSYFDDILQLINDFSKRVILADANLEKINKLYQDNKENISVDELANNIINLFTFTSLGAPAAFKFFDKIVDRKRYTSTKEVLNSTLIHQSITGLYETRIDLGKLGGD

SEQ ID NO: 52 - protein, 1370 aa, Streptococcus agalactiae
MNKPYSIGLDIGTNSVGWSIITDDYKVPAKKMRVLGNTDKEYIKKNLIGALLFDGGNTAADRRLKRTARRRYTRRRNRILYLQEIFAEEMSKVDDSFFHRLEDSFLVEEDKRGSKYPIFATLQEEKDYHEKFSTIYHLRKELADKKEKADLRLIYIALAHIIKFRGHFLIEDDSFDVRNTDISKQYQDFLEIFNTTFENNDLLSQNVDVEAILTDKISKSAKKDRILAQYPNQKSTGIFAEFLKLIVGNQADFKKYFNLEDKTPLQFAKDSYDEDLENLLGQIGDEFADLFSAAKKLYDSVLLSGILTVIDLSTKAPLSASMIQRYDEHREDLKQLKQFVKASLPEKYQEIFADSSKDGYAGYIEGKTNQEAFYKYLSKLLTKQEDSENFLEKIKNEDFLRKQRTFDNGSIPHQVHLTELKAIIRRQSEYYPFLKENQDRIEKILTFRIPYYIGPLAREKSDFAWMTRKTDDSIRPWNFEDLVDKEKSAEAFIHRMTNNDFYLPEEKVLPKHSLIYEKFTVYNELTKVRYKNEQGETYFFDSNIKQEIFDGVFKEHRKVSKKKLLDFLAKEYEEFRIVDVIGLDKENKAFNASLGTYHDLEKILDKDFLDNPDNESILEDIVQTLTLFEDREMIKKRLENYKDLFTESQLKKLYRRHYTGWGRLSAKLINGIRDKESQKTILDYLIDDGRSNRNFMQLINDDGLSFKSIISKAQAGSHSDNLKEVVGELAGSPAIKKGILQSLKIVDELVKVMGYEPEQIVVEMARENQTTNQGRRNSRQRYKLLDDGVKNLASDLNGNILKEYPTDNQALQNERLFLYYLQNGRDMYTGEALDIDNLSQYDIDHIIPQAFIKDDSIDNRVLVSSAKNRGKSDDVPSLEIVKDCKVFWKKLLDAKLMSQRKYDNLTKAERGGLTSDDKARFIQRQLVETRQITKHVARILDERFNNELDSKGRRIRKVKIVTLKSNLVSNFRKEFGFYKIREVNNYHHAHDAYLNAVVAKAILTKYPQLEPEFVYGDYPKYNSYKTRKSATEKLFFYSNIMNFFKTKVTLADGTVVVKDDIEVNNDTGEIVWDKKKHFATVRKVLSYPQNNIVKKTEIQTGGFSKESILAHGNSDKLIPRKTKDIYLDPKKYGGFDSPIVAYSVLVVADIKKGKAQKLKTVTELLGITIMERSRFEKNPSAFLESKGYLNIRDDKLMILPKYSLFELENGRRRLLASAGELQKGNELALPTQFMKFLYLASRYNESKGKPEEIEKKQEFVNQHVSYFDDILQLINDFSKRVILADANLEKINKLYQDNKENISVDELANNIINLFTFTSLGAPAAFKFFDKIVDRKRYTSTKEVLNSTLIHQSITGLYETRIDLGKLGED

SEQ ID NO: 53 - protein, 1370 aa, Streptococcus agalactiae
MNKPYSIGLDIGTNSVGWSIITDDYKVPAKKMRVLGNTDKEYIKKNLIGALLFDGGNTAADRRLKRTARRRYTRRRNRILYLQEIFAEEMSKVDDSFFHRLEDSFLVEEDKRGSKYPIFATLQEEKDYHEKFSTIYHLRKELADKKEKADLRLIYIALAHIIKFRGHFLIEDDSFDVRNTDISKQYQDFLEIFNTTFENNDLLSQNVDVEAILTDKISKSAKKDRILAQYPNQKSTGIFAEFLKLIVGNQADFKKYFNLEDKTPLQFAKDSYDEDLENLLGQIGDEFADLFSAAKKLYDSVLLSGILTVIDLSTKAPLSASMIQRYDEHREDLKQLKQFVKASLPEKYQEIFADSSKDGYAGYIEGKTNQEAFYKYLSKLLTKQEDSENFLEKIKNEDFLRKQRTFDNGSIPHQVHLTELKAIIRRQSEYYPFLKENQDRIEKILTFRIPYYIGPLAREKSDFAWMTRKTDDSIRPWNFEDLVDKEKSAEAFIHRMTNNDFYLPEEKVLPKHSLIYEKFTVYNELTKVRYKNEQGETYFFDSNIKQEIFDGVFKEHRKVSKKKLLDFLAKEYEEFRIVDVIGLDKENKAFNASLGTYHDLEKILDKDFLDNPDNESILEDIVQTLTLFEDREMIKKRLENYKDLFTESQLKKLYRRHYTGWGRLSAKLINGIRDKESQKTILDYLIDDGRSNRNFMQLINDDGLSFKSIISKAQAGSHSDNLKEVVGELAGSPAIKKGILQSLKIVDELVKVVGYEPEQIVVEMARENQTTNQGRRNSRQRYKLLDDGVKNLASDLNGNILKEYPTDNQALQNERLFLYYLQNGRDMYTGEALDIDNLSQYDIDHIIPQAFIKDDSIDNRVLVSSAKNRGKSDDVPSLEIVKDCKVFWKKLLDAKLMSQRKYDNLTKAERGGLTSDDKARFIQRQLVETRQITKHVARILDERFNNELDSKGRRIRKVKIVTLKSNLVSNFRKEFGFYKIREVNNYHHAHDAYLNAVVAKAILTKYPQLEPEFVYGDYPKYNSYKTRKSATEKLFFYSNIMNFFKTKVTLADGTVVVKDDIEVNNDTGEIVWDKKKHFATVRKVLSYPQNNIVKKTEIQTGGFSKESILAHGNSDKLIPRKTKDIYLDPKKYGGFDSPIVAYSVLVVADIKKGKAQKLKTVTELLGITIMERSRFEKNPSAFLESKGYLNIRADKLIILPKYSLFELENGRRRLLASAGELQKGNELALPTQFMKFLYLASRYNESKGKPEEIEKKQEFVNQHVSYFDDILQLINDFSKRVILADANLEKINKLYQDNKENISVDELANNIINLFTFTSLGAPAAFKFFDKIVDRKRYTSTKEVLNSTLIHQSITGLYETRIDLGKLGED

SEQ ID NO: 54 - protein, 1370 aa, Streptococcus agalactiae
MNKPYSIGLDIGTNSVGWSIITDDYKVPAKKMRVLGNTDKEYIKKNLIGALLFDGGNTAADRRLKRTARRRYTRRRNRILYLQEIFAEEMSKVDDSFFHRLEDSFLVEEDKRGSKYPIFATLQEEKDYHEKFSTIYHLRKELADKKEKADLRLIYIALAHIIKFRGHFLIEDDSFDVRNTDISKQYQDFLEIFNTTFENNDLLSQNVDVEAILTDKISKSAKKDRILAQYPNQKSTGIFAEFLKLIVGNQADFKKYFNLEDKTPLQFAKDSYDEDLENLLRQIGDEFADLFSAAKKLYDSVLLSGILTVIDLSTKAPLSASMIQRYDEHREDLKQLKQFVKASLPEKYQEIFADSSKDGYAGYIEGKTNQEAFYKYLSKLLTKQEDSENFLEKIKNEDFLRKQRTFDNGSIPHQVHLTELKAIIRRQSEYYPFLKENQDRIEKILTFRIPYYIGPLAREKSDFAWMTRKTDDSIRPWNFEDLVDKEKSAEAFIHRMTNNDFYLPEEKVLPKHSLIYEKFTVYNELTKVRYKNEQGETYFFDSNIKQEIFDGVFKEHRKVSKKKLLDFLAKEYEEFRIVDVIGLDKENKAFNASLGTYHDLEKILDKDFLDNPDNESILEDIVQTLTLFEDREMIKKRLENYKDLFTESQLKKLYRRHYTGWGRLSAKLINGIRDKESQKTILDYLIDDGRSNRNFMQLINDDGLSFKSIISKAQAGSHSDNLKEVVGELAGSPAIKKGILQSLKIVDELVKVMGYEPEQIVVEMARENQTTNQGRRNSRQRYKLLDDGVKNLASDLNGNILKEYPTDNQALQNERLFLYYLQNGRDMYTGEALDIDNLSQYDIDHIIPQAFIKDDSIDNRVLVSSAKNRGKSDDVPSLEIVKDCKVFWKKLLDAKLMSQRKYDNLTKAERGGLTSDDKARFIQRQLVETRQITKHVARILDERFNNELDSKGRRIRKVKIVTLKSNLVSNFRKEFGFYKIREVNNYHHAHDAYLNAVVAKAILTKYPQLEPEFVYGDYPKYNSYKTRKSATEKLFFYSNIMNFFKTKVTLADGTVVVKDDIEVNNDTGEIVWDKKKHFATVRKVLSYPQNNIVKKTEIQTGGFSKESILAHGNSDKLIPRKTKDIYLDPKKYGGFDSPIVAYSVLVVADIKKGKAQKLKTVTELLGITIMERSRFEKNPSAFLESKGYLNIRADKLIILPKYSLFELENGRRRLLASAGELQKGNELALPTQFMKFLYLASRYNESKGKPEEIEKKQEFVNQHVSYFDDILQLINDFSKRVILADANLEKINKLYQDNKENISVDELANNIINLFTFTSLGAPAAFKFFDKIVDRKRYTSTKEVLNSTLIHQSITGLYETRIDLGKLGED

SEQ ID NO: 55 - protein, 1370 aa, Streptococcus agalactiae
MNKPYSIGLDIGTNSVGWSIITDDYKVPAKKMRVLGNTDKEYIKKNLIGALLFDGGNTAADRRLKRTARRRYTRRRNRILYLQEIFAEEMSKVDDSFFHRLEDSFLVEEDKRGSKYPIFATMQEEKDYHEKFPTIYHLRKELADKKEKADLRLVYLALAHIIKFRGHFLIEDDRFDVRNTDIQKQYQAFLEIFDTSFENNHLLSQNVDVEAILTDKISKSAKKDRILAQYPNQKSTGIFAEFLKLIVGNQADFKKHFNLEDKTPLQFAKDSYDEDLENLLGQIGDEFADLFSAAKKLYDSVLLSGILTVTDLSTKAPLSAYMIQRYDEHREDLKQLKQFVKASLPEKYQEIFADSSKDGYAGYIEGKTNQEAFYKYLSKLLTKQEDSEYFLEKIKNEDFLRKQRTFDNGSIPHQVHLTELKAIIRRQSEYYPFLKENQDKIEKILTFRIPYYVGPLARGNSDFAWMTRKTDDSIRPWNFEDLVDKEKSAEAFIHRMTNNDLYLPEEKVLPKHSLIYEKFTVYNELTKVRYKNEQGETYFFDSNVKQEIFDGVFKEHRKVSKKQLLDFLAKEFEEFRIVDVTGLDKENKAFNASLGTYHDLKKILDKDFLDNPDNESILEDIVQTITLFEDREMIKKRLENYKDLFTESQLKKLYRRHYTGWGRLSAKLINGIRDRESQKTILDYLISDGRANRNFMQLINDDGLSFKSIISKAQSGSHSDNLKEVVGELAGSPAIKKGILQSLKIVDELVKVMGYEPEQIVVEMARENQTTNQGRRNSRQRYKLLEDGVKNLASDLNGDILKEYPTDNQALQNERLFLYYLQNGRDMYTGEALDIDNLSQYDIDHIVPQAFIKDDSIDNRVLVSSAKNRGKSDDVPSIDIVKARKAFWKKLLDAKLISQRKYDNLTKAERGGLTPDDKAGFIQRQLVETRQITKHVARILDERFNNKVDDNNKPIRKVKIVTLKSNLVSNFRKEFGFYKIREVNNYHHAHDAYLNAVVAKAILTKYPQLEPEFVYGDYPKYNSYKTRKSATEKLFFYSNIMNFFKTKVTLADETVVVKDDIEVNNETGEIAWDKKKHFATVRKVLSYPQVNIVKKTEVQTGGFSKESILAHSNSDKLIPRKTKDIYLDPKKYGGFDSPIVAYSVLVLADIKKGKAQKLKTVKELIGITIMERERFEKNPSAFLESKGYLNIRTDKLIILPKYSLFELENGRRRLLASAGELQKGNELALPTQYMKFLYLASRYNESKGKPEEIEKKQEFVNQHISYFDDILQLINDFSKRVILADANLEKINKLYSDNKDNTPVDELAKNIINLFTFTSLGAPAAFKFFDKSVDRKRYTSTKEVLDSTLIHQSITGLYETRIDLGKLGED

SEQ ID NO: 56 - protein, 1370 aa, Streptococcus agalactiae
MNKPYSIGLDIGTNSVGWSIITDDYKVPAKKMRVLGNTDKEYIKKNLIGALLFDGGNTAADRRLKRTARRRYTRRRNRILYLQEIFAEEMSKVDDSFFHRLEDSFLVEEDKRGSKYPIFATMQEEKYYHEKFPTIYHLRKELADKKEKADLRLIYLALAHIIKFRGHFLIEDDRFDVRNTDIQKQYQAFLEIFDTTFENNDLLSQNVDVEAILTDKISKSAKKDRILARYPNQKSTGIFAEFLKLIVGNQADFKKHFNLEDKTPLQFAKDSYDEDLENLLGQIGDEFADLFSAAKKLYDSVLLSGILTVTDLSTKAPLSASMIQHYDEHREDLKQLKQFVKASLPEKYQEIFADSSKDGYAGYIEGKTNQEAFYKYLSKLLTKQEGSEYLLEKIKNEDFLRKQRTFDNGSIPHQVHLTELRAIIRRQSEYYPFLKENLDRIEKILTFRIPYYVGPLAREKSDFAWMTRKTDDSIRPWNFEDLVDKEKSAEAFIHRMTNNDLYLPEEKVLPKHSLIYEKFTVYNELTKVRFLAEGFKDFQFLNRKQKETIFNSLFKEKRKVTEKDIISFLNKVDGYEGIAIKGIEKQFNASLSTYHDLKKILGKDFLDNTDNELILEDIVQTLTLFEDREMIRKRLDIYKDFFTESQLKKLYRRHYTGWGRLSAKLINGIRNKENQKTILDYLIDDGSANRNFMQLIKDAGLSFKPIIDKARTGSHSDNLKEVVGELAGSPAIKKGILQSLKIVDELVKVMGYEPEQIVVEMARENQTTAKGLSRSRQRLTTLRESLANLKSNILEEKKPKYVKDQVENHHLSDDRLFLYYLQNGKDMYTDDELDIDNLSQYDIDHIIPQAFIKDDSIDNRVLVSSAKNRGKSDDVPSVEIVKDCKVFWKKLLDAKLMSQRKYDNLTKAERGGLTSDDKARFIQRQLVETRQITKHVARILDERFNNELDSKGRRIRKVKIVTLKSNLVSNFRKEFGFYKIREVNNYHHAHDAYLNAVVAKAILTKYPQLEPEFVYGDYPKYNSYKTRKSATEKLFFYSNIMNFFKTKVTLADGTVVVKDDIEVNNDTGEIVWDKKKHFATVRKVLSYPQVNIVKKTEIQTGGFSKESILAHGNSDKLIPRKTKDIYLDPKKYGGFDSPIVAYSVLVVADIKKGKAQKLKTVTELLGITIMERSRFEKNPSAFLESKGYLNIRDDKLMILPKYSLFELENGRRRLLASAGELQKGNELALPTQFMKFLYLASRYNELKGKPEEIEQKQEFVVQHVSYFDDILQIINDFSNRVILADANLEKINKLYQDNKENIPVDELANNIINLFTFTSLGAPAAFKFFDKIVDRKRYTSTKEVLNSTLIHQSITGLYETRIDLGKLGED

SEQ ID NO: 57 - protein, 1370 aa, Streptococcus agalactiae
MNKPYSIGLDIGTNSVGWSIITDDYKVPAKKMRVLGNTDKEYIKKNLIGALLFDGGNTAADRRLKRTARRRYTRRRNRILYLQEIFAEEMSKVDDSFFHRLEDSFLVEEDKRGSKYPIFATMQEEKYYHEKFPTIYHLRKELADKKEKADLRLIYLALAHIIKFRGHFLIEDDRFDVRNTDIQKQYQAFLEIFDTTFENNDLLSQNVDVEAILTDKISKSAKKDRILARYPNQKSTGIFAEFLKLIVGNQADFKKHFNLEDKTPLQFAKDSYDEDLENLLGQIGDEFADLFSAAKKLYDSVLLSGILTVTDLSTKAPLSASMIQRYDEHREDLKQLKQFVKASLPEKYQEIFADSSKDGYAGYIEGKTNQEAFYKYLSKLLTKQEGSEYLLEKIKNEDFLRKQRTFDNGSIPHQVHLTELRAIIRRQSEYYPFLKENLDRIEKILTFRIPYYVGPLAREKSDFAWMTRKTDDSIRPWNFEDLVDKEKSAEAFIHRMTNNDLYLPEEKVLPKHSLIYEKFTVYNELTKVRFLAEGFKDFQFLNRKQKETIFNSLFKEKRKVTEKDIISFLNKVDGYEGIAIKGIEKQFNASLSTYHDLKKILGKDFLDNTDNELILEDIVQTLTLFEDREMIRKRLDIYKDFFTESQLKKLYRRHYTGWERLSAKLINGIRNKENQKTILDYLIDDGSANRNFMQLIKDAGLSFKPIIDKARTGSHLDNLKEVVGELAGSPAIKKGILQSLKIVDELVKVMGYEPEQIVVEMARENQTTAKGLSRSRQRLTTLRESLANLKSNILEEKKPKYVKDQVENHHLSDDRLFLYYLQNGKDMYTDDELDIDNLSQYDIDHIIPQAFIKDDSIDNRVLVSSAKNRGKSDDVPSLEIVKDCKVFWKKLLDAKLMSQRKYDNLTKAERGGLTSDDKARFIQRQLVETRQITKHVARILDERFNNELDSKGRRIRKVKIVTLKSNLVSNFRKEFGFYKIREVNNYHHAHDAYLNAVVAKAILTKYPQLEPEFVYGDYPKYNSYKTRKSATEKLFFYSNIMNFFKTKVTLADGTVVVKDDIEVNNDTGEIVWDKKKHFATVRKVLSYPQVNIVKKTEVQTGGFSKESILAHGNSDKLIPRKTKDIYLDPKKYGGFDSPIVAYSVLVVADIKKGKAQKLKTVTELLGITIMERSRFEKNPSAFLESKGYLNIRTDKLIILPKYSLFELENGRRRLLASAGELQKGNELALPTQYMKFLYLASRYNELKGKPEEIEQKQEFVVQHVSYFDDILQIINDFSNRVILADANLEKINKLYQDNKENIPVDELANNIINLFTFTSLGAPAAFKFFDKIVDRKRYTSTKEVLNSTLIHQSITGLYETRIDLGKLGEG

SEQ ID NO: 58 - protein, 1370 aa, Streptococcus sp.
MNKPYSIGLDIGTNSVGWSIITDDYKVPAKKMRVLGNTDKEYIKKNLIGALLFDGGNTAADRRLKRTARRRYTRRRNRILYLQEIFAEEMSKVDDSFFHRLEDSFLVEEDKRGSKYPIFATMQEEKYYHEKFPTIYHLRKELADKKEKADLRLIYLALAHIIKFRGHFLIEDDRFDVRNTDIQKQYQAFLEIFDTTFENNDLLSQNVDVEAILTDKISKSAKKDRILARYPNQKSTGIFAEFLKLIVGNQADFKKHFNLEDKTPLQFAKDSYDEDLENLLGQIGDEFADLFSAAKKLYDSVLLSGILTVTDLSTKAPLSASMIQRYDEHREDLKQLKQFVKASLPEKYQEIFADSSKDGYAGYIEGKTNQEAFYKYLSKLLTKQEGSEYLLEKIKNEDFLRKQRTFDNGSIPHQVHLTELRAIIRRQSEYYPFLKENLDRIEKILTFRIPYYVGPLAREKSDFAWMTRKTDDSIRPWNFEDLVDKEKSAEAFIHRMTNNDLYLPEEKVLPKHSLIYEKFTVYNELTKVRFLAEGFKDFQFLNRKQKETIFNSLFKEKRKVTEKDIISFLNKVDGYEGIAIKGIEKQFNASLSTYHDLKKILGKDFLDNTDNELILEDIVQTLTLFEDREMIRKRLDIYKDFFTESQLKKLYRRHYTGWGRLSAKLINGIRNKENQKTILDYLIDDGSANRNFMQLIKDAGLSFKPIIDKARTGSHLDNLKEVVGELAGSPAIKKGILQSLKIVDELVKVMGYEPEQIVVEMARENQTTAKGLSRSRQRLTTLRESLANLKSNILEEKKPKYVKDQVENHHLSDDRLFLYYLQNGKDMYTDDELDIDNLSQYDIDHIIPQAFIKDDSIDNRVLVSSAKNRGKSDDVPSLEIVKDCKVFWKKLLDAKLMSQRKYDNLTKAERGGLTSDDKARFIQRQLVETRQITKHVARILDERFNNELDSKGRRIRKVKIVTLKSNLVSNFRKEFGFYKIREVNNYHHAHDAYLNAVVAKAILTKYPQLEPEFVYGDYPKYNSYKTRKSATEKLFFYSNIMNFFKTKVTLADGTVVVKDDIEVNNDTGEIVWDKKKHFATVRKVLSYPQVNIVKKTEVQTGGFSKESILAHGNSDKLIPRKTKDIYLDPKKYGGFDSPIVAYSVLVVADIKKGKAQKLKTVTELLGITIMERSRFEKNPSAFLESKGYLNIRTDKLIILPKYSLFELENGRRRLLASAGELQKGNELALPTQYMKFLYLASRYNELKGKPEEIEQKQEFVVQHVSYFDDILQIINDFSNRVILADANLEKINKLYQDNKENIPVDELANNIINLFTFTSLGAPAAFKFFDKIVDRKRYTSTKEVLNSTLIHQSITGLYETRIDLGKLGEG

SEQ ID NO: 59 - protein, 1370 aa, Streptococcus agalactiae
MNKPYSIGLDIGTNSVGWSIITDDYKVPAKKMRVLGNTDKEYIKKNLIGALLFDGGNTAADRRLKRTARRRYTRRRNRILYLQEIFAEEMSKVDDSFFHRLEDSFLVEEDKRGSKYPIFATMQEEKYYHEKFPTIYHLRKELADKKEKADLRLIYLALAHIIKFRGHFLIEDDRFDVRNTDIQKQYQAFLEIFDTTFENNDLLSQNVDVEAILTDKISKSAKKDRILARYPNQKSTGIFAEFLKLIVGNQADFKKHFNLEDKTPLQFAKDSYDEDLENLLGQIGDEFADLFSAAKKLYDSVLLSGILTVTDLSTKAPLSASMIQRYDEHREDLKQLKQFVKASLPEKYQEIFADSSKDGYAGYIEGKTNQEAFYKYLSKLLTKQEGSEYLLEKIKNEDFLRKQRTFDNGSIPHQVHLTELRAIIRRQSEYYPFLKENLDRIEKILTFRIPYYVGPLAREKSDFAWMTRKTDDSIRPWNFEDLVDKEKSAEAFIHRMTNNDLYLPEEKVLPKHSLIYEKFTVYNELTKVRFLAEGFKDFQFLNRKQKETIFNSLFKEKRKVTEKDIISFLNKVDGYEGIAIKGIEKQFNASLSTYHDLKKILGKDFLDNTDNELILEDIVQTLTLFEDREMIRKRLDIYKDFFTESQLKKLYRRHYTGWGRLSAKLINGIRNKENQKTILDYLIDDGSANRNFMQLIKDAGLSFKPIIDKARTGSHSDNLKEVVGELAGSPAIKKGILQSLKIVDELVKVMGYEPEQIVVEMARENQTTAKGLSRLRQRLTTLRESLANLKSNILEEKKPKYVKDQVENHHLSDDRLFLYYLQNGKDMYTDDELDIDNLSQYDIDHIIPQAFIKDDSIDNRVLVSSAKNRGKSDDVPSVEIVKDCKVFWKKLLDAKLMSQRKYDNLTKAERGGLTSDDKARFIQRQLVETRQITKHVARILDERFNNELDSKGRRIRKVKIVTLKSNLVSNFRKEFGFYKIREVNNYHHAHDAYLNAVVAKAILTKYPQLEPEFVYGDYPKYNSYKTRKSATEKLFFYSNIMNFFKTKVTLADGTVVVKDDIEVNNDTGEIVWDKKKHFATVRKVLSYPQVNIVKKTEIQTGGFSKESILAHGNSDKLIPRKTKDIYLDPKKYGGFDSPIVAYSVLVVADIKKGKAQKLKTVTELLGITIMERSRFEKNPSAFLESKGYLNIRDDKLMILPKYSLFELENGRRRLLASADELQKGNELALPTQFMKFLYLASRYNELKGKPEEIEQKQEFVVQHVSYFDDILQIINDFSNRVILADANLEKINKLYQDNKENIPVDELANNIINLFTFTSLGAPAAFKFFDKIVDRKRYTSTKEVLNSTLIHQSITGLYETRIDLGKLGED

SEQ ID NO: 60 - protein, 1370 aa, Streptococcus agalactiae
MNKPYSIGLDIGTNSVGWSIITDDYKVPAKKMRVLGNTDKEYIKKNLIGALLFDGGNTAADRRLKRTARRRYTRRRNRILYLQEIFAEEMSKVDDSFFHRLEDSFLVEEDKRGSKYPIFATMQEEKYYHEKFPTIYHLRKELADKKEKADLRLIYLALAHIIKFRGHFLIEDDRFDVRNTDIQKQYQAFLEIFDTTFENNDLLSQNVDVEAILTDKISKSAKKDRILARYPNQKSTGIFAEFLKLIVGNQADFKKHFNLEDKTPLQFAKDSYDEDLENLLGQIGDEFADLFSAAKKLYDSVLLSGILTVTDLSTKAPLSASMIQRYDEHREDLKQLKQFVKASLPEKYQEIFADSSKDGYAGYIEGKTNQEAFYKYLSKLLTKQEGSEYLLEKIKNEDFLRKQRTFDNGSIPHQVHLTELRAIIRRQSEYYPFLKENLDRIEKILTFRIPYYVGPLAREKSDFAWMTRKTDDSIRPWNFEDLVDKEKSAEAFIHRMTNNDLYLPEEKVLPKHSLIYEKFTVYNELTKVRFLAEGFKDFQFLNRKQKETIFNSLFKEKRKVTEKDIISFLNKVDGYEGIAIKGIEKQFNASLSTYHDLKKILGKDFLDNTDNELILEDIVQTLTLFEDREMIRKRLDIYKDFFTESQLKKLYRRHYTGWGRLSAKLINGIRNKENQKTILDYLIDDGSANRNFMQLIKDAGLSFKPIIDKARTGSHSDNLKEVVGELAGSPAIKKGILQSLKIVDELVKVMGYEPEQIVVEMARENQTTAKGLSRSRQRLTTLRESLANLKSNILEEKKPKYVKDQVENHHLSDDRLFLYYLQNGKDMYTDDELDIDNLSQYDIDHIIPQAFIKDDSIDNRVLVSSAKNRGKSDDVPSVEIVKDCKVFWKKLLDAKLMSQRKYDNLTKAERGGLTSDDKARFIQRQLVETRQITKHVARILDERFNNELDSKGRRIRKVKIVTLKSNLVSNFRKEFGFYKIREVNNYHHAHDAYLNAVVAKAILTKYPQLEPEFVYGDYPKYNSYKTRKSATEKLFFYSNIMNFFKTKVTLADGTVVVKDDIEVNNDTGEIVWDKKKHFATVRKVLSYPQVNIVKKTEIQTGGFSKESILAHGNSDKLIPRKTKDIYLDPKKYGGFDSPIVAYSVLVVADIKKGKAQKLKTVTELLGITIMERSRFEKNPSAFLESKGYLNIRDDKLMILPKYSLFELENGRRRLLASAGELQKGNELALPTQFMKFLYLASRYNELKGKPEEIEQKQEFVVQHVSYFDDILQIINDFSNRVILADANLEKINKLYQDNKENIPVDELANNIINLFTFTSLGAPAAFKFFDKIVDRKRYTSTKEVLNSTLIHQSITGLYETRIDLGKLGED

SEQ ID NO: 61 - protein, 1370 aa, Streptococcus agalactiae
MNKPYSIGLDIGTNSVGWSIITDDYKVPAKKMRVLGNTDKEYIKKNLIGALLFDGGNTAADRRLKRTARRRYTRRRNRILYLQEIFAEEMSKVDDSFFHRLEDSFLVEEDKRGSKYPIFATMQEEKYYHEKFPTIYHLRKELADKKEKADLRLIYLALAHIIKFRGHFLIEDDRFDVRNTDIQKQYQAFLEIFDTTFENNDLLSQNVDVEAILTDKISKSAKKDRILARYPNQKSTGIFAEFLKLIVGNQADFKKHFNLEDKTPLQFAKDSYDEDLENLLGQIGDEFADLFSAAKKLYDSVLLSGILTVTDLSTKAPLSASMIQRYDEHREDLKQLKQFVKASLPEKYQEIFADSSKDGYAGYIEGKTNQEAFYKYLSKLLTKQEGSEYLLEKIKNEDFLRKQRTFDNGSIPHQVHLTELRAIIRRQSEYYPFLKENLDRIEKILTFRIPYYVGPLAREKSDFAWMTRKTDDSIRPWNFEDLVDKEKSAEAFIHRMTNNDLYLPEEKVLPKHSLIYEKFTVYNELTKVRFLAEGFKDFQFLNRKQKETIFNSLFKEKRKVTEKDIISFLNKVDGYEGIAIKGIEKQFNASLSTYHDLKKILGKDFLDNTDNELILEDIVQTLTLFEDREMIRKRLDIYKDFFTESQLKKLYRRHYTGWGRLSAKLINGIRNKENQKTILDYLIDDGSANRNFMQLIKDAGLSFKPIIDKARTGSHSDNLKEVVGELAGSPAIKKGILQSLKIVDELVKVMGYEPEQIVVEMARENQTTAKGLSRSRQRLTTLRESLANLKSNILEEKKPKYVKDQVENHHLSDDRLFLYYLQNGKDMYTDDELDIDNLSQYDIDHIIPQAFIKDDSIDNRVLVSSAKNRGKSDDVPSVEIVKDCKVFWKKLLDAKLMSQRKYDNLTKAERGGLTSDDKARFIQRQLVETRQITKHVARILDERFNNELDSKGRRIRKVKIVTLKSNLVSNFRKEFGFYKIREVNNYHHAHDAYLNAVVAKAILTKYPQLEPEFVYGDYPKYNSYKTRKSATEKLFFYSNIMNFFKTKVTLADGTVVVKDDIEVNNDTGEIVWDKKKHFATVRKVLSYPQVNIVKKTEIQTGGFSKESILAHGNSDKLIPRKTKDIYLDPKKYGGFDSPKVAYSVLVVADIKKGKAQKLKTVTELLGITIMERSRFEKNPSAFLESKGYLNIRDDKLMILPKYSLFELENGRRRLLASAGELQKGNELALPTQFMKFLYLASRYNELKGKPEEIEQKQEFVVQHVSYFDDILQIINDFSNRVILADANLEKINKLYQDNKENIPVDELANNIINLFTFTSLGAPAAFKFFDKIVDRKRYTSTKEVLNSTLIHKSITGLYETRIDLGKLGED

SEQ ID NO: 62 - protein, 1370 aa, Streptococcus agalactiae
MNKPYSIGLDIGTNSVGWSIITDDYKVPAKKMRVLGNTDKEYIKKNLIGALLFDGGNTAADRRLKRTARRRYTRRRNRILYLQEIFAEEMSKVDDSFFHRLEDSFLVEEDKRGSKYPIFATMQEEKYYHEKFPTIYHLRKELADKKEKADLRLIYLALAHIIKFRGHFLIEDDRFDVRNTDIQKQYQAFLEIFDTTFENNDLLSQNVDVEAILTDKISKSAKKDRILARYPNQKSTGIFAEFLKLIVGNQADFKKHFNLEDKTPLQFAKDSYDEDLENLLGQIGDEFADLFSAAKKLYDSVLLSGILTVTDLSTKAPLSASMIQRYDEHREDLKQLKQFVKASLPEKYQEIFADSSKDGYAGYIEGKTNQEAFYKYLSKLLTKQEGSEYLLEKIKNEDFLRKQRTFDNGSIPHQVHLTELRAIIRRQSEYYPLLKENLDRIEKILTFRIPYYVGPLAREKSDFAWMTRKTDDSIRPWNFEDLVDKEKSAEAFIHRMTNNDLYLPEEKVLPKHSLIYEKFTVYNELTKVRFLAEGFKDFQFLNRKQKETIFNSLFKEKRKVTEKDIISFLNKVDGYEGIAIKGIEKQFNASLSTYHDLKKILGKDFLDNTDNELILEDIVQTLTLFEDREMIRKRLDIYKDFFTESQLKKLYRRHYTGWGRLSAKLINGIRNKENQKTILDYLIDDGSANRNFMQLIKDAGLSFKPIIDKARTGSHSDNLKEVVGELAGSPAIKKGILQSLKIVDELVKVMGYEPEQIVVEMARENQTTAKGLSRSRQRLTTLRESLANLKSNILEEKKPKYVKDQVENHHLSDDRLFLYYLQNGKDMYTDDELDIDNLSQYDIDHIIPQAFIKDDSIDNRVLVSSAKNRGKSDDVPSVEIVKDCKVFWKKLLDAKLMSQRKYDNLTKAERGGLTSDDKARFIQRQLVETRQITKHVARILDERFNNELDSKGRRIRKVKIVTLKSNLVSNFRKEFGFYKIREVNNYHHAHDAYLNAVVAKAILTKYPQLEPEFVYGDYPKYNSYKTRKSATEKLFFYSNIMNFFKTKVTLADGTVVVKDDIEVNNDTGEIVWDKKKHFATVRKVLSYPQVNIVKKTEIQTGGFSKESILAHGNSDKLIPRKTKDIYLDPKKYGGFDSPIVAYSVLVVADIKKGKAQKLKTVTELLGITIMERSRFEKNPSAFLESKGYLDIRDDKLMILPKYSLFELENGRRRLLASAGELQKGNELALPTQFMKFLYLASRYNELKGKPEEIEQKQEFVVQHVSYFDDILQIINDFSNRVILADANLEKINKLYQDNKENIPVDELANNIINLFTFTSLGAPAAFKFFDKIVDRKRYTSTKEVLNSTLIHQSITGLYETRIDLGKLGED

SEQ ID NO: 63 - protein, 1370 aa, Streptococcus agalactiae
  VARIANT 117: note = Any amino acid
MNKPYSIGLDIGTNSVGWSIITDDYKVPAKKMRVLGNTDKEYIKKNLIGALLFDGGNTAADRRLKRTARRRYTRRRNRILYLQEIFAEEMSKVDDSFFHRLEDSFLVEEDKRGSKYXIFATLQEEKDYHEKFSTIYHLRKELADKKEKADLRLIYIALAHIIKFRGHFLIEDDSFDVRNTDISKQYQDFLEIFNTTFENNDLLSQNVDVEAILTDKISKSAKKDRILAQYPNQKSTGIFAEFLKLIVGNQADFKKYFNLEDKTPLQFAKDSYDEDLENLLGQIGDEFADLFSAAKKLYDSVLLSGILTVIDLSTKAPLSASMIQRYDEHREDLKQLKQFVKASLPEKYQEIFADSSKDGYAGYIEGKTNQEAFYKYLSKLLTKQEDSENFLEKIKNEDFLRKQRTFDNGSIPHQVHLTELKAIIRRQSEYYPFLKENQDRIEKILTFRIPYYIGPLAREKSDFAWMTRKTDDSIRPWNFEDLVDKEKSAEAFIHRMTNNDFYLPEEKVLPKHSLIYEKFTVYNELTKVRYKNEQGETYFFDSNIKQEIFDGVFKEHRKVSKKKLLDFLAKEYEEFRIVDVIGLDKENKAFNASLGTYHDLEKILDKDFLDNPDNESILEDIVQTLTLFEDREMIKKRLENYKDLFTESQLKKLYRRHYTGWGRLSAKLINGIRDKESQKTILDYLIDDGRSNRNFMQLINDDGLSFKSIISKAQAGSHSDNLKEVVGELAGSPAIKKGILQSLKIVDELVKVMGYEPEQIVVEMARENQTTNQGRRNSRQRYKLLDDGVKNLASDLNGNILKEYPTDNQALQNERLFLYYLQNGRDMYTGEALDIDNLSQYDIDHIIPQAFIKDDSIDNRVLVSSAKNRGKSDDVPSLEIVKDCKVFWKKLLDAKLMSQRKYDNLTKAERGGLTSDDKARFIQRQLVETRQITKHVARILDERFNNELDSKGRRIRKVKIVTLKSNLVSNFRKEFGFYKIREVNNYHHAHDAYLNAVVAKAILTKYPQLEPEFVYGDYPKYNSYKTRKSATEKLFFYSNIMNFFKTKVTLADGTVVVKDDIEVNNDTGEIVWDKKKHFATVRKVLSYPQNNIVKKTEIQTGGFSKESILAHGNSDKLIPRKTKDIYLDPKKYGGFDSPIVAYSVLVVADIKKGKAQKLKTVTELLGITIMERSRFEKNPSAFLESKGYLNIRADKLIILPKYSLFELENGRRRLLASAGELQKGNELALPTQFMKFLYLASRYNESKGKPEEIEKKQEFVNQHVSYFDDILQLINDFSKRVILADANLEKINKLYQDNKENISVDELANNIINLFTFTSLGAPAAFKFFDKIVDRKRYTSTKEVLNSTLIHQSITGLYETRIDLGKLGED

SEQ ID NO: 64 - protein, 1370 aa, Streptococcus agalactiae
MNKPYSIGLDIGTNSVGWSIITDDYKVPAKKMRVLGNTDKEYIKKNLIGALLFDGGNTAADRRLKRTSRRRYTRRRNRILYLQEIFAEEMSKVDDSFFHRLEDSFLVEEDKRGSKYPIFATLQEEKDYHEKFSTIYHLRKELADKKEKADLRLIYIALAHIIKFRGHFLIEDDSFDVRNTDISKQYQDFLEIFNTTFENNDLLSQNVDVEAILTDKISKSAKKDRILAQYPNQKSTGIFAEFLKLIVGNQADFKKYFNLEDKTPLQFAKDSYDEDLENLLGQIGDEFADLFSAAKKLYDSVLLSGILTVIDLSTKAPLSASMIQRYDEHREDLKQLKQFVKASLPEKYQEIFADSSKDGYAGYIEGKTNQEAFYKYLSKLLTKQEDSENFLEKIKNEDFLRKQRTFDNGSIPHQVHLTELKAIIRRQSEYYPFLKENQDRIEKILTFRIPYYIGPLAREKSDFAWMTRKTDDSIRPWNFEDLVDKEKSAEAFIHRMTNNDFYLPEEKVLPKHSLIYEKFTVYNELTKVRYKNEQGETYFFDSNIKQEIFDGVFKEHRKVSKKKLLDFLAKEYEEFRIVDVIGLDKENKAFNASLGTYHDLEKILDKDFLDNPDNESILEDIVQTLTLFEDREMIKKRLENYKDLFTESQLKKLYRRHYTGWGRLSAKLINGIRDKESQKTILDYLIDDGRSNRNFMQLINDDGLSFKSIISKAQAGSHSDNLKEVVGELAGSPAIKKGILQSLKIVDELVKVMGYEPEQIVVEMARENQTTNQGRRNSRQRYKLLDDGVKNLASDLNGNILKEYPTDNQALQNERLFLYYLQNGRDMYTGEALDIDNLSQYDIDHIIPQAFIKDDSIDNRVLVSSAKNRGKSDDVPSLEIVKDCKVFWKKLLDAKLMSQRKYDNLTKAERGGLTSDDKARFIQRQLVETRQITKHVARILDERFNNELDSKGRRIRKVKIVTLKSNLVSNFRKEFGFYKIREVNNYHHAHDAYLNAVVAKAILTKYPQLEPEFVYGDYPKYNSYKTRKSATEKLFFYSNIMNFFKTKVTLADGTVVVKDDIEVNNDTGEIVWDKKKHFATVRKVLSYPQNNIVKKTEIQTGGFSKESILAHGNSDKLIPRKTKDIYLDPKKYGGFDSPIVAYSVLVVADIKKGKAQKLKTVTELLGITIMERSRFEKNPSAFLESKGYLNIRADKLIILPKYSLFELENGRRRLLASAGELQKGNELALPTQFMKFLYLASRYNESKGKPEEIEKKQEFVNQHVSYFDDILQLINDFSKRVILADANLEKINKLYQDNKENISVDELANNIINLFTFTSLGAPAAFKFFDKIVDRKRYTSTKEVLNSTLIHQSITGLYETRIDLGKLGED

SEQ ID NO: 65 - protein, 1370 aa, Streptococcus agalactiae
MNKPYSIGLDIGTNSVGYSVVTDDYKVPAKKMRVLGNTDKEYIKKNLIGALLFDGGNTASDRRLKRTARRRYTCRRNRILYLQEIFAEEMSKVDDSFFHRLEDSFLVEDDKRGSKYPIFATMQEEKDYHEKFPTIYHLRKELADKKEKANLRLVYLALAHIIKFRGHFLIEDDSFDVRNTDIQRQYQAFLEIFDTTFENNHLLSQNIDVEGILTDKISKSAKKDRILAQYPNQKSTGIFAEFLKLIVGNQADFKKHFNLEDKTPLQFAKDSYDEDLENLLGQIGDEFADLFSVAKKLYDSVLLSGILTVTDLSTKAPLSASMIQRYDEHREDLKQLKQFVKASLPEKYQEIFTDSSKDGYAGYIEGKTNQGAFYKYLSKLLTKQEGSEYFLEKIKNEDFLRKQRTFDNGSIPHQVHLTELKAIIRRQSEYYPFLKENLDRIEKILTFRIPYYVGPLAREKSDFAWMTRKTDDSIRPWNFEELVDKEASAEAFIHRMTNNDLYLPEEKVLPKHSLIYEKFTVYNELTKVRYKNEQGETYFFDSNIKQEIFDGVFKEHRKVSKKKLLDFLAKEYEEFRIVDVIGLDKENKAFNASLGTYHDLKKILDKDFLDNPDNESILEDIVQTLTLFEDREMIKKRLENYKDLFTESQLKKLYRRHYTGWGRLSAKLINGIRDKESQKTILDYLISDGRANRNFMQLIHDDGLSFKPIIDKAQAGSHSDNLKEVVGELAGSPAIKKGILQSLKIVDELVKVMGYEPEQVVVEMARENQTTNQGRRNTRQRYKLLEEGVKNLASDLNGNILKEYPTDNQALQNERLFLYYLQNGRDMYTGEALDIDNLSQYDIDHIVPQAFIKDDSIDNRVLVSSAKNRGKSDNVPSIDIVKARKAFWKKLLDAKLMSQRKYDNLTKAERGGLTSDDKARFIQRQLVETRQITKHVARILDERFNNELDSKGRRIRKVKIVTLKSNLVSNFRKEFGFYKIREVNDYHHAHDAYLNAVVAKAILTKYPQLEPEFVYGDYPKYNSYKTRKSATEKLFFYSNIMNFFKTKVTLADGTVVVKDDIEVNNDTGEIVWDKKKHFATVRKVLSYPQVNIVKKTEIQTGGFSKESILAHGNSDKLIPRKTKDIYLDPKKYGGFDSPIVAYSVLVVADIKKGKAQKLKTVTELLGITIMERFRFEKNPSAFLESKGYLNIRDDKLMILPKYSLFELENGRRRLLASAGELQKGNELALPTQYMKFLYLASRYNELKGKPEEIEQKQEFVVQHVSYFDDILQIINDFSNRVILADANLEKINKLYQDNKENISVDELANNIINLFTFTSLGAPAAFKFFDKIVDRKRYTSTKEVLNSTLIHQSITGLYETRIDLGKLGED

SEQ ID NO: 66 - protein, 1370 aa, Streptococcus sp.
MNKPYSIGLDIGTNSVGYSVVTDDYKVPAKKMRVLGNTDKEYIKKNLIGALLFDGGNTASDRRLKRTARRRYTRRRNRILYLQEIFAEEMSKVDDSFFHRLEDSFLVEDDKRGSKYPIFATMQEEKDYHEKFPTIYHLRKELADKKEKADLRLVYLALAHIIKFRGHFLIEDDSFDVRNTDIQRQYQAFLEIFDTTFENNHLLSQNIDVEGILTDKISKSAKKDRILAQYPNQKSTGIFAEFLKLIVGNQADFKKHFNLEDKTPLQFAKDSYDEDLENLLGQIGDEFADLFSVAKKLYDSVLLSGILTVTDLSTKAPLSASMIQRYDEHREDLKQLKQFVKASLPEKYQEIFTDSSKDGYAGYIEGKTNQGAFYKYLSKLLTKQEGSEYFLEKIKNEDFLRKQRTFDNGSIPHQVHLTELKAIIRRQSEYYPFLKENLDRIEKILTFRIPYYVGPLAREKSDFAWMTRKTDDSIRPWNFEELVDKEASAEAFIHRMTNNDLYLPEEKVLPKHSLIYEKFTVYNELTKVRYKNEQGETYFFDSNIKQEIFDGVFKEHRKVSKKKLLDFLAKEYEEFRIVDVIGLDKENKAFNASLGTYHDLKKILDKDFLDNPDNESILEDIVQTLTLFEDREMIKKRLENYKDLFTESQLKKLYRRHYTGWGRLSAKLINGIRDKESQKTILDYLISDGRANRNFMQLIHDDGLSFKPIIDKAQAGSHSDNLKEVVGELAGSPAIKKGILQSLKIVDELVKVMGYEPEQVVVEMARENQTTNQGRRNTRQRYKLLEEGVKNLASDLNGNILKEYPTDNQALQNERLFLYYLQNGRDMYTGEALDIDNLSQYDIDHIVPQAFIKDDSIDNRVLVSSAKNRGKSDNVPSIDIVKARKAFWKKLLDAKLMSQRKYDNLTKAERGGLTSDDKARFIQRQLVETRQITKHVARILDERFNNELDSKGRRIRKVKIVTLKSNLVSNFRKEFGFYKIREVNDYHHAHDAYLNAVVAKAILTKYPQLEPEFVYGDYPKYNSYKTRKSATEKLFFYSNIMNFFKTKVTLADGTVVVKDDIEVNNDTGEIVWDKKKHFATVRKVLSYPQVNIVKKTEIQTGGFSKESILAHGNSDKLIPRKTKDIYLDPKKYGGFDSPIVAYSVLVVADIKKGKAQKLKTVTELLGITIMERFRFEKNPSAFLESKGYLNIRDDKLMILPKYSLFELENGRRRLLASAGELQKGNELALPTQYMKFLYLASRYNELKGKPEEIEQKQEFVVQHVSYFDDILQIINDFSNRVILADANLEKINKLYQDNKENISVDELANNIINLFTFTSLGAPAAFKFFDKIVDRKRYTSTKEVLNSTLIHQSITGLYETRIDLGKLGED

SEQ ID NO: 67 - protein, 1370 aa, Streptococcus agalactiae
MNKPYSIGLDIGTNSVGYSVVTDDYKVPAKKMRVLGNTDKEYIKKNLIGALLFDGGNTASDRRLKRTARRRYTRRRNRILYLQEIFAEEMSKVDDSFFHRLEDSFLVEDDKRGSKYPIFATMQEEKDYHEKFPTIYHLRKELADKKEKADLRLVYLALAHIIKFRGHFLIEDDSFDVRNTDIQRQYQAFLEIFDTTFENNHLLSQNIDVEGILTDKISKSAKKDRILAQYPNQKSTGIFAEFLKLIVGNQADFKKHFNLEDKTPLQFAKDSYDEDLENLLGQIGDEFADLFSVAKKLYDSVLLSGILTVTDLSTKAPLSASMIQRYDEHREDLKQLKQFVKASLPEKYQEIFTDSSKDGYAGYIEGKTNQGAFYKYLSKLLTKQEGSEYFLEKIKNEDFLRKQRTFDNGSIPHQVHLTELKAIIRRQSEYYPFLKENLDRIEKILTFRIPYYVGPLAREKSDFAWMTRKTDDSIRPWNFEELVDKEASAEAFIHRMTNNDLYLPEEKVLPKHSLIYEKFTVYNELTKVRYKNEQGETYFFDSNIKQEIFDGVFKEHRKVSKKKLLDFLAKEYEEFRIVDVIGLDKENKAFNASLGTYHDLKKILDKDFLDNPDNESILEDIVQTLTLFEDREMIKKRLENYKDLFTESQLKKLYRRHYTGWGRLSAKLINGIRDKESQKTILDYLISDGRANRNFMQLIHDDGLSFKPIIDKAQAGSHSDNLKEVVGELAGSPAIKKGILQSLKIVDELVKVMGYEPEQVVVEMARENQTTNQGRRNTRQRYKLLEEGVKNLASDLNGNILKEYPTDNQALQNERLFLYYLQNGRDMYTGETLDIDNLSQYDIDHIVPQAFIKDDSIDNRVLVSSAKNRGKSDNVPSIDIVKARKAFWKKLLDAKLMSQRKYDNLTKAERGGLTSDDKARFIQRQLVETRQITKHVARILDERFNNELDSKGRRIRKVKIVTLKSNLVSNFRKEFGFYKIREVNDYHHAHDAYLNAVVAKAILTKYPQLEREFVYGDYPKYNSYKTRKSATEKLFFYSNIMNFFKTKVTLADGTVVVKDDIEVNNDTGEIVWDKKKHFATVRKVLSYPQVNIVKKTEIQTGGFSKESILAHGNSDKLIPRKTKDIYLDPKKYGGFDSPIVAYSVLVVADIKKGKAQKLKTVTELLGITIMERFRFEKNPSAFLESKGYLNIRDDKLMILPKYSLFELENGRRRLLASAGELQKGNELALPTQYMKFLYLASRYNELKGKPEEIEQKQEFVVQHVSYFDDILQIINDFSNRVILADANLEKINKLYQDNKENISVDELANNIINLFTFTSLGAPAAFKFFDKIVDRKRYTSTKEVLNSTLIHQSITGLYETRIDLGKLGED

SEQ ID NO: 68 - protein, 1370 aa, Streptococcus agalactiae
MNKPYSIGLDIGTNSVGYSVVTDDYKVPAKKMRVLGNTDKEYIKKNLIGALLFDGGNTASDRRLKRTARRRYTRRRNRILYLQEIFAEEMSKVDDSFFHRLEDSFLVEDDKRGSKYPIFATMQEEKDYHEKFPTIYHLRKELADKKEKANLRLVYLALAHIIKFRGHFLIEDDSFDVRNTDIQRQYQAFLEIFDTTFENNHLLSQNIDVEGILTDKISKSAKKDRILAQYPNQKSTGIFAEFLKLIVGNQADFKKHFNLEDKTPLQFAKDSYDEDLENLLGQIGDEFADLFSVAKKLYDSVLLSGILTVTDLSTKAPLSASMIQRYDEHREDLKQLKQFVKASLPEKYQEIFTDSSKDGYAGYIEGKTNQGAFYKYLSKLLTKQEGSEYFLEKIKNEDFLRKQRTFDNGSIPHQVHLTELKAIIRRQSEYYPFLKENLDRIEKILTFRIPYYVGPLAREKSDFAWMTRKTDDSIRPWNFEELVDKEASAEAFIHRMTNNDLYLPEEKVLPKHSLIYEKFTVYNELTKVRYKNEQGETYFFDSNIKQEIFDGVFKEHRKVSKKKLLDFLAKEYEEFRIVDVIGLDKENKAFNASLGTYHDLKKILDKDFLDNPDNESILEDIVQTLTLFEDREMIKKRLENYKDLFTESQLKKLYRRHYTGWGRLSAKLINGIRDKESQKTILDYLISDGRANRNFMQLIHDDGLSFKPIIDKAQAGSHSDNLKEVVGELAGSPAIKKGILQSLKIVDELVKVMGYEPEQVVVEMARENQTTNQGRRNTRQRYKLLEEGVKNLASDLNGNILKEYPTDNQALQNERLFLYYLQNGRDMYTGEALDIDNLSQYDIDHIVPQAFIKDDSIDNRVLVSSAKNRGKSDNVPSIDIVKARKAFWKKLLDAKLMSQRKYDNLTKAERGGLTSDDKARFIQRQLVETRQITKHVARILDERFNNELDSKGRRIRKVKIVTLKSNLVSNFRKEFGFYKIREVNDYHHAHDAYLNAVVAKAILTKYPQLEPEFVYGDYPKYNSYKTRKSATEKLFFYSNIMNFFKTKVTLADGTVVVKDDIEVNNDTGEIVWDKKKHFATVRKVLSYPQVNIVKKTEIQTGGFSKESILAHGNSDKLIPRKTKDIYLDPKKYGGFDSPIVAYSVLVVADIKKGKAQKLKTVTELLGITIMERFRFEKNPSAFLESKGYLNIRDDKLMILPKYSLFELENGRRRLLASAGELQKGNELALPTQYMKFLYLASRYNELKGKPEEIEQKQEFVVQHVSYFDDILQIINDFSNRVILADANLEKINKLYQDNKENISVDELANNIINLFTFTSLGAPAAFKFFDKIVDRKRYTSTKEVLNSTLIHQFITGLYETRIDLGKLGED

SEQ ID NO: 69 - protein, 1370 aa, Streptococcus agalactiae
MNKPYSIGLDIGTNSVGYSVVTDDYKVPAKKMRVLGNTDKEYIKKNLIGALLFDGGNTASDRRLKRTARRRYTRRRNRILYLQEIFAEEMSKVDDSFFHRLEDSFLVEDDKRGSKYPIFATMQEEKDYHEKFPTIYHLRKELADKKEKANLRLVYLALAHIIKFRGHFLIEDDSFDVRNTDIQRQYQAFLEIFDTTFENNHLLSQNIDVEGILTDKISKSAKKDRILAQYPNQKSTGIFAEFLKLIVGNQADFKKHFNLEDKTPLQFAKDSYDEDLENLLGQIGDEFADLFSVAKKLYDSVLLSGILTVTDLSTKAPLSASMIQRYDEHREDLKQLKQFVKASLPEKYQEIFTDSSKDGYAGYIEGKTNQGAFYKYLSKLLTKQEGSEYFLEKIKNEDFLRKQRTFDNGSIPHQVHLTELKAIIRRQSEYYPFLKENLDRIEKILTFRIPYYVGPLAREKSDFAWMTRKTDDSIRPWNFEELVDKEASAEAFIHRMTNNDLYLPEEKVLPKHSLIYEKFTVYNELTKVRYKNEQGETYFFDSNIKQEIFDGVFKEHRKVSKKKLLDFLAKEYEEFRIVDVIGLDKENKAFNASLGTYHDLKKILDKDFLDNPDNESILEDIVQTLTLFEDREMIKKRLENYKDLFTESQLKKLYRRHYTGWGRLSAKLINGIRDKESQKTILDYLISDGRANRNFMQLIHDDGLSFKPIIDKAQAGSHSDNLKEVVGELAGSPAIKKGILQSLKIVDELVKVMGYEPEQVVVEMARENQTTNQGRRNTRQRYKLLEEGVKNLASDLNGNILKEYPTDNQALQNERLFLYYLQNGRDMYTGEALDIDNLSQYDIDHIVPQAFIKDDSIDNRVLVSSAKNRGKSDNVPSIDIVKARKAFWKKLLDAKLMSQRKYDNLTKAERGGLTSDDKARFIQRQLVETRQITKHVARILDERFNNELDSKGRRIRKVKIVTLKSNLVSNFRKEFGFYKIREVNDYHHAHDAYLNAVVAKAILTKYPQLEPEFVYGDYPKYNSYKTRKSATEKLFFYSNIMNFFKTKVTLADGTVVVKDDIEVNNDTGEIVWDKKKHFATVRKVLSYPQVNIVKKTEIQTGGFSKESILAHGNSDKLIPRKTKDIYLDPKKYGGFDSPIVAYSVLVVADIKKGKAQKLKTVTELLGITIMERFRFEKNPSAFLESKGYLNIRDDKLMILPKYSLFELENGRRRLLASAGELQKGNELALPTQYMKFLYLASRYNELKGKPEEIEQKQEFVVQHVSYFDDILQIINDFSNRVILADANLEKINKLYQDNKENISVDELANNIINLFTFTSLGAPAAFKFFDKIVDRKRYTSTKEVLNSTLIHQSITGLYETRIDLGKLGED

SEQ ID NO: 70 - protein, 1370 aa, Streptococcus agalactiae
MNKPYSIGLDIGTNSVGWSIITDDYKVPAKKMRVLGNTDKEYIKKNLIGALLFDGGNTAADRRLKRTARRRYTRRRNRILYLQEIFAEEMSKVDDSFFHRLEDSFLVEEDKRGSKYPIFATMQEEKDYHEKFPTIYHLRKELADKKEKADLRLVYLALAHIIKFRGHFLIEDDRFDVRNTDIQKQYQAFLEIFDTSFENNHLLSQNVDVEAILTDKISKSAKKDRILAQYPNQKSTGIFAEFLKLIVGNQADFKKHFNLEDKTPLQFAKDSYDEDLENLLGQIGDEFADLFSAAKKLYDSVLLSGILTVTDLSTKAPLSASMIQRYDEHREDLKQLKQFVKASLPEKYQEIFADSSKDGYAGYIEGKTNQEAFYKYLSKLLTKQEDSEYFLEKIKNEDFLRKQRTFDNGSIPHQVHLTELKAIIRRQSEYYPFLKENQDKIEKILTFRIPYYVGPLARGNSDFAWMTRKTDDSIRPWNFEDLVDKEKSAEAFIHRMTNNDLYLPEEKVLPKHSLIYEKFTVYNELTKVRYKNEQGETYFFDSNVKQEIFDGVFKEHRKVSKKQLLDFLAKEFEEFRIVDVTGLDKENKAFNASLGTYHDLKKILDKDFLDNPDNESILEDIVQTITLFEDREMIKKRLENYKDLFTESQLKKLYRRHYTGWGRLSAKLINGIRDRESQKTILDYLISDGRANRNFMQLINDDGLSFKSIISKAQSGSHSDNLKEVVGELAGSPAIKKGILQSLKIVDELVKVMGYEPEQIVVEMARENQTTNQGRRNSRQRYKLLEDGVKNLASDLNGDILKEYPTDNQALQNERLFLYYLQNGRDMYTGEALDIDNLSQYDIDHIVPQAFIKDDSIDNRVLVSSAKNRGKSDDVPSIDIVKARKAFWKKLLDAKLISQRKYDNLTKAERGGLTPDDKAGFIQRQLVETRQITKHVARILDERFNNKVDDNNKPIRKVKIVTLKSNLVSNFRKEFGFYKIREVNNYHHAHDAYLNAVVAKAILTKYPQLEPEFVYGDYPKYNSYKTRKSATEKLFFYSNIMNFFKTKVTLADETVVVKDDIEVNNETGEIAWDKKKHFATVRKVLSYPQVNIVKKTEVQTGGFSKESILAHSNSDKLIPRKTKDIYLDPKKYGGFDSPIVAYSVLVLADIKKGKAQKLKTVKELIGITIMERERFEKNPSAFLESKGYLNIRTDKLIILPKYSLFELENGRRRLLASAGELQKGNELALPTQYMKFLYLASRYNESKGKPEEIEKKQEFVNQHVSYFDDILQLINDFSKRVILADANLEKINKLYSDNKDNTPVDELAKNIINLFTFTSLGAPAAFKFFDKSVDRKRYTSTKEVLDSTLIHQSITGLYETRIDLGKLGED

SEQ ID NO: 71 - protein, 1370 aa, Streptococcus agalactiae
MNKPYSIGLDIGTNSVGWSIITDDYKVPAKKMRVLGNTDKEYIKKNLIGALLFDGGNTAADRRLKRTARRRYTRRRNRILYLQEIFAEEMSKVDDSFFHRLEDSFLVEEDKRGSKYPIFATMQEEKYYHEKFPTIYHLRKELADKKEKADLRLIYLALAHIIKFRGHFLIEDDRFDVRNTDIQKQYQAFLEIFDTTFENNDLLSQNVDVEAILTDKISKSAKKDRILARYPNQKSTGIFAEFLKLIVGNQADFKKHFNLEDKTPLQFAKDSYDEDLENLLGQIGDEFADLFSAAKKLYDSVLLSGILTVTDLSTKAPLSASMIQRYDEHREDLKQLKQFVKASLPEKYQEIFADSSKDGYAGYIEGKTNQEAFYKYLSKLLTKQEGSEYLLEKIKNEDFLRKQRTFDNGSIPHQVHLTELRAIIRRQSEYYPFLKENLDRIEKILTFRIPYYVGPLAREKSDFAWMTRKTDDSIRPWNFEDLVDKEKSAEAFIHRMTNNDLYLPEEKVLPKHSLIYEKFTVYNELTKVRFLAEGFKDFQFLNRKQKETIFNSLFKEKRKVTEKDIISFLNKVDGYEGIAIKGIEKQFNASLSTYHDLKKILGKDFLDNTDNELILEDIVQTLTLFEDREMIRKRLDIYKDFFTESQLKKLYRRHYTGWGRLSAKLINGIRNKENQKTILDYLIDDGSANRNFMQLIKDAGLSFKPIIDKARTGSHSDNLKEVVGELAGSPAIKKGILQSLKIVDELVKVMGYEPEQIVVEMARENQTTAKGLSRLRQRLTTLRESLANLKSNILEEKKPKYVKDQVENHHLSDDRLFLYYLQNGKDMYTDDELDIDNLSQYDIDLIIPQAFIKDDSIDNRVLVSSAKNRGKSDDVPSVEIVKDCKVFWKKLLDAKLMSQRKYDNLTKAERGGLTSDDKARFIQRQLVETRQITKHVARILDERFNNELDSKGRRIRKVKIVTLKSNLVSNFRKEFGFYKIREVNNYHHAHDAYLNAVVAKAILTKYPQLEPEFVYGDYPKYNSYKTRKSATEKLFFYSNIMNFFKTKVTLADGTVVVKDDIEVNNDTGEIVWDKKKHFATVRKVLSYPQVNIVKKTEIQTGGFSKESILAHGNSDKLIPRKTKDIYLDPKKYGGFDSPIVAYSVLVVADIKKGKAQKLKTVTELLGITIMERSRFEKNPSAFLESKGYLNIRDDKLMILPKYSLFELENGRRRLLASADELQKGNELALPTQFMKFLYLASRYNELKGKPEEIEQKQEFVVQHVSYFDDILQIINDFSNRVILADANLEKINKLYQDNKENIPVDELANNIINLFTFTSLGAPAAFKFFDKIVDRKRYTSTKEVLNSTLIHQSITGLYETRIDLGKLGED

SEQ ID NO: 72 - protein, 1370 aa, Streptococcus agalactiae
MNKPYSIGLDIGTNSVGWSIITDDYKVPAKKMRVLGNTDKEYIKKNLIGALLFDGGNTASDRRLKRTARRRYTRRRNRILYLQEIFAEEMSKVDDSFFHRLEDSFLVEDDKRGSKYPIFATMQEEKDYHEKFPTIYHLRKELADKKEKADLRLFYLALAHIIKFRGHFLIEDDSFDVRNTDIQRQYQAFLEIFDTTFENNHLLSQNIDIEGILTDKISKSAKKDRILAQYPNQKSTGIFAEFLKLIVGNQADFKKHFNLEDKTPLQFAKDSYDEDLENLLGQIGDEFADLFSVAKKLYDSVLLSGILTVTDLSTKAPLSASMIQRYDEHREDLKQLKQFVKASLPEKYQEIFTDSSKDGYAGYIEGKTNQGAFYKYLSKLLTKQEGSEYFLEKIKNEDFLRKQRTFDNGSIPHQVHLTELKAIIRRQSEYYPFLKENLDRIEKILTFRIPYYVGPLAREKSDFAWMTRKTDDSIRPWNFEELVDKEASAEAFIHRMTNNDLYLPEEKVLPKHSLIYEKFTVYNELTKVRYKNEQGETYFFDSNIKQEIFDGVFKEHRKVSKKKLLDFLAKEYEEFRIVDVIGLDKENKAFNASLGTYHDLKKILDKDFLDNPDNESILEDIVQTLTLFEDREMIKKRLENYKDLFTESQLKKLYRRHYTGWGRLSAKLINGIRDKESQKTILDYLIDDGKSNRNFMQLIHDDGLSFKSIISKAQAGSHSDNLKEVVGELAGSPAIKKGILQSLKIVDELVKVMGYEPEQIVVEMARENQTTNQGRRNSRQRYKLLDDGVKNLASDLNGNILKEYPTDNQALQNERLFLYYLQNGRDMYTGKALDIDNLSQYDIDHIIPQAFIKDDSIDNRVLVSSAKNRGKSDDVPSLEIVKDCKVFWKKLLDAKLMSQRKYDNLTKAERGGLTSDDKARFIQRQLVETRQITKHVARILDERFNNELDSKGRRIRKVKIVTLKSNLVSNFRKEFGFYKIREVNNYHHAHDAYLNAVVAKAILTKYPQLEPEFVYGDYPKYNSYKTRKSATEKLFFYSNIMNFFKTKVTLADGTVVVKDDIEVNNDTGEIVWDKKKHFATVRKVLSYPQVNIVKKTEIQTGGFSKESILAHGNSDKLIPRKTKDIYLDPKKYGGFDSPIVAYSVLVVADIKKGKAQKLKTVTELLGITIMERSRFEKNPSAFLESKGYLNIRDDKLMILPKYSLFELENGRRRLLASAGELQKGNELALPTQFMKFLYLASRYNELKGKPEEIEQKQEFVVQHVSYFDDILQIINDFSNRVILADANLEKINKLYQDNKENISVDELANNIINLFTFTSLGAPAAFKFFDKIVDRKRYTSTKEVLNSTLIHQSITGLYETRIDLGKLGED

SEQ ID NO: 73 - protein, 1370 aa, Streptococcus agalactiae
MNKPYSIGLDIGTNSVGWSIITDDYKVPAKKMRVLGNTDKEYIKKNLIGALLFDGGNTASDRRLKRTARRRYTRRRNRILYLQEIFAEEMSKVDDSFFHRLEDSFLVEDDKRGSKYPIFATMQEEKDYHEKFPTIYHLRKELADKKEKADLRLFYLALAHIIKFRGHFLIEDDSFDVRNTDIQRQYQAFLEIFDTTFENNHLLSQNIDVEGILTDKISKSAKKDRILAQYPNQKSTGIFAEFLKLIVGNQADFKKHFNLEDKTPLQFAKDSYDEDLENLLGQIGDEFADLFSVAKKLYDSVLLSGILTVTDLSTKAPLSASMIQRYDEHREDLKQLKQFVKASLPEKYQEIFTDSSKDGYAGYIEGKTNQGAFYKYLSKLLTKQEGSEYFLEKIKNEDFLRKQRTFDNGSIPHQVHLTELKAIIRRQSEYYPFLKENLDRIEKILTFRIPYYVGPLAREKSDFAWMTRKTDDSIRPWNFEELVDKEASAEAFIHRMTNNDLYLPEEKVLPKHSLIYEKFTVYNELTKVRYKNEQGETYFFDSNIKQEIFDGVFKEHRKVSKKKLLDFLAKEYEEFRIVDVIGLDKENKAFNASLGTYHDLKKILDKDFLDNPDNESILEDIVQTLTLFEDREMIKKRLENYKDLFTESQLKKLYRRHYTGWGRLSAKLINGIRDKESQKTILDYLIDDGKSNRNFMQLIHDDGLSFKSIISKAQAGSHSDNLKEVVGELAGSPAIKKGILQSLKIVDELVKVMGYEPEQIVVEMARENQTTNQGRRNSRQRYKLLDDGVKNLASDLNGNILKEYPTDNQALQNERLFLYYLQNGRDMYTGKALDIDNLSQYDIDHIIPQAFIKDDSIDNRVLVSSAKNRGKSDDVPSLEIVKDCKVFWKKLLDAKLMSQRKYDNLTKAERGGLTSDDKARFIQRQLVETRQITKHVARILDERFNNELDSKGRRIRKVKIVTLKSNLVSNFRKEFGFYKIREVNNYHHAHDAYLNAVVAKAILTKYPQLEPEFVYGDYPKYNSYKTRKSATEKLFFYSNIMNFFKTKVTLADGTVVVKDDIEVNNDTGEIVWDKKKHFATVRKVLSYPQVNIVKKTEIQTGGFSKESILAHGNSDKLIPRKTKDIYLDPKKYGGFDSPIVAYSVLVVADIKKGKAQKLKTVTELLGITIMERSRFEKNPSAFLESKGYLNIRDDKLMILPKYSLFELENGRRRLLASAGELQKGNELALPTQFMKFLYLASRYNELKGKPEEIEQKQEFVVQHVSYFDDILQIINDFSNRVILADANLEKINKLYQDNKENISVDELANNIINLFTFTSLGAPAAFKFFDKIVDRKRYTSTKEVLNSTLIHQSITGLYETRIDLGKLGED

SEQ ID NO: 74 - protein, 1370 aa, Streptococcus agalactiae
MNKPYSIGLDIGTNSVGWSIITDDYKVPAKKMRVLGNTDKEYIKKNLIGALLFDGGNTAADRRLKRTARRRYTRRRNRILYLQEIFAEEMSKVDDSFFHRLEDSFLVEEDKRGSKYPIFATLQEEKDYHEKFPTIYHLRKELADKKEKADLRLIYIALAHIIKFRGHFLIEDDSFDVRNTDISKQYQDFLEIFNTTFENNDLLSQNVDVEAILTDKISKSAKKDRILAQYPNQKSTGIFAEFLKLIVGNQADFKKYFNLEDKTPLQFAKDSYDEDLENLLGQIGDEFADLFSAAKKLYDSVLLSGILTVIDLSTKAPLSASMIQRYDEHREDLKQLKQFVKASLPEKYQEIFADSSKDGYAGYIEGKTNQEAFYKYLSKLLTKQEDSENFLEKIKNEDFLRKQRTFDNGSIPHQVHLTELKAIIRRQSEYYPFLKENQDRIEKILTFRIPYYIGPLAREKSDFAWMTRKTDDSIRPWNFEDLVDKEKSAEAFIHRMTNNDFYLPEEKVLPKHSLIYEKFTVYNELTKVRYKNEQGETYFFDSNIKQEIFDGVFKEHRKVSKKKLLDFLAKEYEEFRIVDVIGLDKENKAFNASLGTYHDLEKILDKDFLDNPDNESILEDIVQTLTLFEDREMIKKRLENYKDLFTESQLKKLYRRHYTGWGRLSAKLINGIRDKESQKTILDYLIDDGRSNRNFMQLINDDGLSFKSIISKAQAGSHSDNLKEVVGELAGSPAIKKGILQSLKIVDELVKVMGYEPEQIVVEMARENQTTNQGRRNSRQRYKLLDDGVKNLASDLNGNILKEYPTDNQALQNERLFLYYLQNGRDMYTGEALDIDNLSQYDIDHIIPQAFIKDDSIDNRVLVSSAKNRGKSDDVPSLEIVKDCKVFWKKLLDAKLMSQRKYDNLTKAERGGLTSDDKARFIQRQLVETRQITKHVARILDERFNNELDSKGRRIRKVKIVTLKSNLVSNFRKEFGFYKIREVNNYHHAHDAYLNAVVAKAILTKYPQLEPEFVYGDYPKYNSYKTRKSATEKLFFYSNIMNFFKTKVTLADGTVVVKDDIEVNNDTGEIVWDKKKHFATVRKVLSYPQNNIVKKTEIQTGGFSKESILAHGNSDKLIPRKTKDIYLDPKKYGGFDSPIVAYSVLVVADIKKGKAQKLKTVTELLGITIMERSRFEKNPSAFLESKGYLNIRADKLIILPKYSLFELENGRRRLLASAGELQKGNELALPTQFMKFLYLASRYNESKGKPEEIEKKQEFVNQHVSYFDDILQLINDFSKRVILADANLEKINKLYQDNKENISVDELANNIINLFTFTSLGAPAAFKFFDKIVDRKRYTSTKEVLNSTLIHQSITGLYETRIDLGKLGED

SEQ ID NO: 75 - protein, 1370 aa, Streptococcus agalactiae
MNKPYSIGLDIGTNSVGYSVVTDDYKVPAKKMRVLGNTDKEYIKKNLIGALLFDGGNTASDRRLKRTARRRYTRRRNRILYLQEIFAEEMSKVDDSFFHRLEDSFLVEDDKRGSKYPIFATMQEEKDYHEKFPTIYHLRKELADKKEKADLRLVYLALAHIIKFRGHFLIEDDSFDVRNTDIQRQYQAFLEIFDTTFENNHLLSQNIDVEGILTDKISKSAKKDRILAQYPNQKSTGIFAEFLKLIVGNQADFKKHFNLEDKTPLQFAKDSYDEDLENLLGQIGDEFADLFSVAKKLYDSVLLSGILTVTALSTKAPLSASMIQRYDEHREDLKQLKQFVKASLPEKYQEIFTDSSKDGYAGYIEGKTNQGAFYKYLSKLLTKQEGSEYFLEKIKNEDFLRKQRTFDNGSIPHQVHLTELKAIIRRQSEYYPFLKENLDRIEKILTFRIPYYVGPLAREKSDFAWMTRKTDDSIRPWNFEELVDKEASAEAFIHRMTNNDLYLPEEKVLPKHSLIYEKFTVYNELTKVRYKNEQGETYFFDSNIKQEIFDGVFKEHRKVSKKKLLDFLAKEYEEFRIVDVIGLDKENKAFNASLGTYHDLKKILDKDFLDNPDNESILEDIVQTLTLFEDREMIKKRLENYKDLFTESQLKKLYRRHYTGWGRLSAKLINGIRDKESQKTILDYLISDGRANRNFMQLIHDDGLSFKPIIDKAQAGSHSDNLKEVVGELAGSPAIKKGILQSLKIVDELVKVMGYEPEQVVVEMARENQTTNQGRRNTRQRYKLLEEGVKNLASDLNGNILKEYPTDNQALQNERLFLYYLQNGRDMYTGEALDIDNLSQYDIDHIVPQAFIKDDSIDNRVLVSSAKNRGKSDNVPSIDIVKARKAFWKKLLDAKLMSQRKYDNLTKAERGGLTSDDKARFIQRQLVETRQITKHVARILDERFNNELDSKGRRIRKVKIVTLKSNLVSNFRKEFGFYKIREVNDYHHAHDAYLNAVVAKAILTKYPQLEPEFVYGDYPKYNSYKTRKSATEKLFFYSNIMNFFKTKVTLADGTVVVKDDIEVNNDTGEIVWDKKKHFATVRKVLSYPQVNIVKKTEIQTGGFSKESILAHGNSDKLIPRKTKDIYLDPKKYGGFDSPIVAYSVLVVADIKKGKAQKLKTVTELLGITIMERFRFEKNPSAFLESKGYLNIRDDKLMILPKYSLFELENGRRRLLASAGELQKGNELALPTQYMKFLYLASRYNELKGKPEEIEQKQEFVVQHVSYFDDILQIINDFSNRVILADANLEKINKLYQDNKENISVDELANNIINLFTFTSLGAPAAFKFFDKIVDRKRYTSTKEVLNSTLIHQSITGLYETRIDLGKLGED

SEQ ID NO: 76 - protein, 1370 aa, Streptococcus agalactiae
MNKPYSIGLDIGTNSVGWSIITDDYKVPAKKMRVLGNTDKEYIKKNLIGALLFDGGNTAADRRLKRTARRRYTRRRNRILYLQEIFAEEMSKVDDSFFHRLEDSFLVEEDKRGSKYPIFATLQEEKDYHEKFSTIYHLRKELADKKEKADLRLIYIALAHIIKFRGHFLIEDDSFDVRNTDISKQYQDFLEIFNTTFENNDLLSQNVDVEAILTDKISKSAKKDRILAQYPNQKSTGIFAEFLKLIVGNQADFKKYFNLEDKTPLQFAKDSYDEDLENLLGQIGDEFADLFSAAKKLYDSVLLSGILTVIDLSTKAPLSASMIQRYDEHREDLKQLKQFVKASLPEKYQEIFADSSKDGYAGYIEGKTNQEAFYKYLSKLLTKQEDSENFLEKIKNEDFLRKQRTFDNGSIPHQVHLTELKAIIRRQSEYYPFLKENQDRIEKILTFRIPYYIGPLAREKSDFAWMTRKTDDSIRPWNFEDLVDKEKSAEAFIHRMTNNDFYLPEEKVLPKHSLIYEKFTVYNELTKVRYKNEQGETYFFDSNIKQEIFDGVFKEHRKVSKKKLLDFLAKEYEEFRIVDVIGLDKENKAFNASLGTYHDLEKILDKDFLDNPDNESILEDIVQTLTLFEDREMIKKRLENYKDLFTESQLKKLYRRHYTGWGRLSAKLINGIRDKESQKTILDYLIDDGRSNRNFMQLINDDGLSFKSIISKAQAGSHSDNLKEVVGELAGSPAIKKGILQSLKIVDELVKVMGYEPEQIVVEMARENQTTNQGRRNSRQRYKLLDDGVKNLASDLNGNILKEYPTDNQALQNERLFLYYLQNGRDMYTGEALDIDNLSQYDIDHIIPQAFIKDDSIDNRVLVSSAKNRGKSDDVPSLEIVKDCKVFWKKLLDAKLMSQRKYDNLTKAERGGLTSDDKARFIQRQLVETRQITKHVARILDERFNNELDSKGRRIRKVKIVTLKSNLVSNFRKEFGFYKIREVNNYHHAHDAYLNAVVAKAILTKYPQLEPEFVYGDYPKYNSYKTRKSATEKLFFYSNIMNFFKTKVTLADGTVVVKDDIEVNNDTGEIVWDKKKHFATVRKVLSYPQNNIVKKTEIQTGGFSKESILAHGNSDKLIPRKTKDIYLDPKKYGGFDSPIVAYSVLVAADIKKGKAQKLKTVTELLGITIMERSRFEKNPSAFLESKGYLNIRADKLIILPKYSLFELENGRRRLLASAGELQKGNELALPTQFMKFLYLASRYNESKGKPEEIEKKQEFVNQHVSYFDDILQLINDFSKRVILADANLEKINKLYQDNKENISVDELANNIINLFTFTSLGAPAAFKFFDKIVDRKRYTSTKEVLNSTLIHQSITGLYETRIDLGKLGED

SEQ ID NO: 77 - protein, 1370 aa, Streptococcus agalactiae
MNKPYSIGLDIGTNSVGWSIITDDYKVPAKKMRVLGNTDKEYIKKNLIGALLFDGGNTAADRRLKRTARRRYTRRRNRILYLQEIFAEEMSKVDDSFFHRLEDSFLVEEDKRGSKYPIFATLQEEKDYHEKFSTIYHLRKELADKKEKADLRLIYIALAHIIKFRGHFLIEDDSFDVRNTDISKQYQDFLEIFNTTFENNDLLSQNVDVEAILTDKISKSAKKDRILAQYPNQKSTGIFAEFLKLIVGNQADFKKYFNLEDKTPLQFAKDSYDEDLENLLGQIGDEFADLFSAAKKLYDSVLLSGILTVIDLSTKASLSDSMIQRYDEHREDLKQLKQFVKASLPEKYQEIFADSSKDGYAGYIEGKTNQEAFYKYLSKLLTKQEDSENFLEKIKNEDFLRKQRTFDNGSIPHQVHLTELKAIIRRQSEYYPFLKENQDRIEKILTFRIPYYIGPLAREKSDFAWMTRKTDDSIRPWNFEDLVDKEKSAEAFIHRMTNNDFYLPEEKVLPKHSLIYEKFTVYNELTKVRYKNEQGETYFFDSNIKQEIFDGVFKEHRKVSKKKLLDFLAKEYEEFRIVDVIGLDKENKAFNASLGTYHDLEKILDKDFLDNPDNESILEDIVQTLTLFEDREMIKKRLENYKDLFTESQLKKLYRRHYTGWGRLSAKLINGIRDKESQKTILDYLIDDGRSNRNFMQLINDDGLSFKSIISKAQAGSHSDNLKEVVGELAGSPAIKKGILQSLKIVDELVKVMGYEPEQIVVEMARENQTTNQGRRNSRQRYKLLDDGVKNLASDLNGNILKEYPTDNQALQNERLFLYYLQNGRDMYTGEALDIDNLSQYDIDHIIPQAFIKDDSIDNRVLVSSAKNRGKSDDVPSLEIVKDCKVFWKKLLDAKLMSQRKYDNLTKAERGGLTSDDKARFIQRQLVETRQITKHVARILDERFNNELDSKGRRIRKVKIVTLKSNLVSNFRKEFGFYKIREVNNYHHAHDAYLNAVVAKAILTKYPQLEPEFVYGDYPKYNSYKTRKSATEKLFFYSNIMNFFKTKVTLADGTVVVKDDIEVNNDTGEIVWDKKKHFATVRKVLSYPQNNIVKKTEIQTGGFSKESILAHGNSDKLIPRKTKDIYLDPKKYGGFDSPIVAYSVLVVADIKKGKAQKLKTVTELLGITIMERSRFEKNPSAFLESKGYLNIRADKLIILPKYSLFELENGRRRLLASAGELQKGNELALPTQFMKFLYLASRYNESKGKPEEIEKKQEFVNQHVSYFDDILQLINDFSKRVILADANLEKINKLYQDNKENISVDELANNIINLFTFTSLGAPAAFKFFDKIVDRKRYTSTKEVLNSTLIHQSITGLYETRIDLGKLGED

SEQ ID NO: 78 - protein, 1370 aa, Streptococcus agalactiae
MNKPYSIGLDIGTNSVGWSIITDDYKVPAKKMRVLGNTDKEYIKKNLIGALLFDGGNTAADRRLKRTARRRYTRRRNRILYLQEIFAEEMSKVDDSFFHRLEDSFLVEEDKRGSKYPIFATLQEEKDYHEKFSTIYHLRKELADKKEKADLRLIYIALAHIIKFRGHFLIEDDSFDVRNTDISKQYQDFLEIFNTTFENNDLLSQNVDVEAILTDKISKSAKKDRILAQYPNQKSTGIFAEFLKLIVGNQADFKKYFNLEDKTPLQFAKDSYDEDLENLLGQIGDEFADLFSAAKKLYDSVLLSGILTVIDLSTKAPLSASMIQRYDEHREDLKQLKQFVKASLPEKYQEIFADSSKDGYAGYIEGKTNQEAFYKYLSKLLTKQEDSENFLEKIKNEDFLRKQRTFDNGSIPHQVHLTELKAIIRRQSEYYPFLKENQDRIEKILTFRIPYYIGPLAREKSDFAWMTRKTDDSIRPWNFEDLVDKEKSAEAFIHRMTNNDFYLPEEKVLPKHSLIYEKFTVYNELTKVRYKNEQGETYFFDSNIKQEIFDGVFKEHRKVSKKKLLDFLAKEYEEFRIVDVIGLDKENKAFNASLGTYHDLEKILDKDFLDNPDNESILEDIVQTLTLFEDREMIKKRLENYKDLFTESQLKKLYRRHYTGWGRLSAKLINGIRDKESQKTILDYLIDDGRSNRNFMQLINDDGLSFKSIISKAQAGSHSDNLKEVVGELAGSPAIKKGILQSLKIVDELVKVMGYEPEQIVVEMARENQTTNQGRRNSRQRYKLLDDGVKNLASDLNGNILKEYPTDNQALQNERLFLYYLQNGRDMYTGEALDIDNLSQYDIDHIIPQAFIKDDSIDNRVLVSSAKNRGKSDDVPSLEIVKDCKVFWKKLLDAKLMSQRKYDNLTKAERGGLTSDDKARFIQRQLVEIRQITKHVARILDERFNNELDSKGRRIRKVKIVTLKSNLVSNFRKEFGFYKIREVNNYHHAHDAYLNAVVAKAILTKYPQLEPEFVYGDYPKYNSYKTRKSATEKLFFYSNIMNFFKTKVTLADGTVVVKDDIEVNNDTGEIVWDKKKHFATVRKVLSYPQNNIVKKTEIQTGGFSKESILAHGNSDKLIPRKTKDIYLDPKKYGGFDSPIVAYSVLVVADIKKGKAQKLKTVTELLGITIMERSRFEKNPSAFLESKGYLNIRADKLIILPKYSLFELENGRRRLLASAGELQKGNELALPTQFMKFLYLASRYNESKGKPEEIEKKQEFVNQHVSYFDDILQLINDFSKRVILADANLEKINKLYQDNKENISVDELANNIINLFTFTSLGAPAAFKFFDKIVDRKRYTSTKEVLNSTLIHQSITGLYETRIDLGKLGED

SEQ ID NO: 79 - protein, 1370 aa, Streptococcus agalactiae
MNKPYSIGLDIGTNSVGWSIITDDYKVPAKKMRVLGNTDKEYIKKNLIGALLFDGGNTAADRRLKRTARRRYTRRRNRILYLQEIFAEEMSKVDDSFFHRLEDSFLVEEDKRGSKYPIFATLQEEKDYHEKFSTIYHLRKELADKKEKADLRLIYIALAHIIKFRGHFLIEDDSFDVRNTDISKQYQDFLEIFNTTFENNDLLSQNVDVEAILTDKISKSAKKDRILAQYPNQKSTGIFAEFLKLIVGNQADFKKYFNLEDKTPLQFAKDSYDEDLENLLGQIGDEFADLFSAAKKLYDSVLLSGILTVIDLSTKAPLSASMIQRYDEHREDLKQLKQFVKASLPEKYQEIFADSSKDGYAGYIEGKTNQEAFYKYLSKLLTKQEDSENFLEKIKNEDFLRKQRTFDNGSIPHQVHLTELKAIIRRQSEYYPFLKENQDRIEKILTFRIPYYIGPLAREKSDFAWMTRKTDDSIRPWNFEDLVDKEKSAEAFIHRMTNNDFYLPEEKVLPKHSLIYEKFTVYNELTKVRYKNEQGETYFFDSNIKQEIFDGVFKEHRKVSKKKLLDFLAKEYEEFRIVDVIGLDKENKAFNASLGTYHDLEKILDKDFLDNPDNESILEDIVQTLTLFEDREMIKKRLENYKDLFTESQLKKLYRRHYTGWGRLSAKLINGIRDKESQKTILDYLIDDGRSNRNFMQLINDDGLSFKSIISKAQAGSHSDNLKEVVGELAGSPAIKKGILQSLKIVDELVKVMGYEPEQIVVEMARENQTTNQGRRNSRQRYKLLDDGVKNLASDLNGNILKEYPTDNQALQNERLFLYYLQNGRDMYTGEALDIDNLSQYDIDHIIPQAFIKDDSIDNRVLVSSAKNRGKSDDVPSLEIVKDCKVFWKKLLDAKLMSQRKYDNLTKAERGGLTSDDKARFIQRQLVETRQITKHVARILDERFNNELDSKGRRIRKVKIVTVKSNLVSNFRKEFGFYKIREVNNYHHAHDAYLNAVVAKAILTKYPQLEPEFVYGDYPKYNSYKTRKSATEKLFFYSNIMNFFKTKVTLADGTVVVKDDIEVNNDTGEIVWDKKKHFATVRKVLSYPQNNIVKKTEIQTGGFSKESILAHGNSDKLIPRKTKDIYLDPKKYGGFDSPIVAYSVLVVADIKKGKAQKLKTVTELLGITIMERSRFEKNPSAFLESKGYLNIRADKLIILPKYSLFELENGRRRLLASAGELQKGNELALPTQFMKFLYLASRYNESKGKPEEIEKKQEFVNQHVSYFDDILQLINDFSKRVILADANLEKINKLYQDNKENISVDELANNIINLFTFTSLGAPAAFKFFDKIVDRKRYTSTKEVLNSTLIHQSITGLYETRIDLGKLGED

SEQ ID NO: 80 - protein, 1370 aa, Streptococcus agalactiae
MNKPYSIGLDIGTNSVGWSIITDDYKVPAKKMRVLGNTDKEYIKKNLIGALLFDGGNTAADRRLKRTARRRYTRRRNRILYLQEIFAEEMSKVDDSFFHRLEDSFLVEEDKRGSKYPIFATLQEEKDYHEKFSTIYHLRKELADKKEKADLRLIYIALAHIIKFRGHFLIEDDSFDVRNTDISKQYQDFLEIFNTTFENNDLLSQNVDVEAILTDKISKSAKKDRILAQYPNQKSTGIFAEFLKLIVGNQADFKKYFNLEDKTPLQFAKDSYDEDLENLLGQIGDEFADLFSAAKKLYDSVLLSGILTVIDLSTKAPLSASMIQRYDEHREDLKQLKQFVKASLPEKYQEIFADSSKDGYAGYIEGKTNQEAFYKYLSKLLTKQEDSENFLEKIKNEDFLRKQRTFDNGSIPHQVHLTELKAIIRRQSEYYPFLKENQDRIEKILTFRIPYYIGPLAREKSDFAWMTRKTDDSIRPWNFEDLVDKEKSAEAFIHRMTNNDFYLPEEKVLPKHSLIYEKFTVYNELTKVRYKNEQGETYFFDSNIKQEIFDGVFKEHRKVSKKKLLDFLAKEYEEFRIVDVIGLDKENKAFNASLGTYHDLEKILDKDFLDNPDNESILEDIVQTLTLFEDREMIKKRLENYKDLFTESQLKKLYRRHYTGWGRLSAKLINGIRDKESQKTILDYLIDDGRSNRNFMQLINDDGLSFKSIISKAQAGSHSDNLKEVVGELAGSPAIKKGILQSLKIVDELVKVMGYEPEQIVVEMARENQTTNQGRRNSRQRYKLLDDGVKNLASDLNGNILKEYPTDNQALQNERLFLYYLQNGRDMYTGEALDIDNLSQYDIDHIIPQAFIKDDSIDNRVLVSSAKNRGKSDDVPSLEIVKDCKVFWKKLLDAKLMSQRKYDNLTKAERGGLTSDDKARFIQRQLVETRQITKHVARILDELFNNELDSKGRRIRKVKIVTLKSNLVSNFRKEFGFYKIREVNNYHHAHDAYLNAVVAKAILTKYPQLEPEFVYGDYPKYNSYKTRKSATEKLFFYSNIMNFFKTKVTLADGTVVVKDDIEVNNDTGEIVWDKKKHFATVRKVLSYPQNNIVKKTEIQTGGFSKESILAHGNSDKLIPRKTKDIYLDPKKYGGFDSPIVAYSVLVVADIKKGKAQKLKTVTELLGITIMERSRFEKNPSAFLESKGYLNIRADKLIILPKYSLFELENGRRRLLASAGELQKGNELALPTQFMKFLYLASRYNESKGKPEEIEKKQEFVNQHVSYFDDILQLINDFSKRVILADANLEKINKLYQDNKENISVDELANNIINLFTFTSLGAPAAFKFFDKIVDRKRYTSTKEVLNSTLIHQSITGLYETRIDLGKLGGD

SEQ ID NO: 81 - protein, 1384 aa, Streptococcus agalactiae
MNKPYSIGLDIGTNSVGWSIITDDYKVPAKKMRVLGNTDKEYIKKNLIGALLFDGGNTAADRRLKRTARRRYTRRRNRILYLQEIFAEEMSKVDDSFFHRLEDSFLVEEDKRGSKYPIFATLQEEKDYHEKFSTIYHLRKELADKKEKADLRLIYIALAHIIKFRGHFLIEDDSFDVRNTDISKQYQDFLEIFNTTFENNDLLSQNVDVEAILTDKISKSAKKDRILAQYPNQKSTGIFAEFLKLIVGNQADFKKYFNLEDKTPLQFAKDSYDEDLENLLGQIGDEFADLFSAAKKLYDSVLLSGILTVIDLSTKAPLSASMIQRYDEHREDLKQLKQFVKASLPEKYQEIFADSSKDGYAGYIEGKTNQEAFYKYLSKLLTKQEDSENFLEKIKNEDFLRKQRTFDNGSIPHQVHLTELKAIIRRQSEYYPFLKENQDRIEKILTFRIPYYIGPLAREKSDFAWMTRKTDDSIRPWNFEDLVDKEKSAEAFIHRMTNNDFYLPEEKVLPKHSLIYEKFTVYNELTKVRYKNEQGETYFFDSNIKQEIFDGVFKEHRKVSKKKLLDFLAKEYEEFRIVDVIGLDKENKAFNASLGTYHDLEKILDKDFLDNPDNESILEDIVQTLTLFEDREMIKKRLENYKDLFTESQLKKLYRRHYTGWGRLSAKLINGIRDKESQKTILDYLIDDGRSNRNFMQLINDDGRSNRNFMQLINDDGLSFKSIISKAQAGSHSDNLKEVVGELAGSPAIKKGILQSLKIVDELVKVMGYEPEQIVVEMARENQTTNQGRRNSRQRYKLLDDGVKNLASDLNGNILKEYPTDNQALQNERLFLYYLQNGRDMYTGEALDIDNLSQYDIDHIIPQAFIKDDSIDNRVLVSSAKNRGKSDDVPSLEIVKDCKVFWKKLLDAKLMSQRKYDNLTKAERGGLTSDDKARFIQRQLVETRQITKHVARILDERFNNELDSKGRRIRKVKIVTLKSNLVSNFRKEFGFYKIREVNNYHHAHDAYLNAVVAKAILTKYPQLEPEFVYGDYPKYNSYKTRKSATEKLFFYSNIMNFFKTKVTLADGTVVVKDDIEVNNDTGEIVWDKKKHFATVRKVLSYPQNNIVKKTEIQTGGFSKESILAHGNSDKLIPRKTKDIYLDPKKYGGFDSPIVAYSVLVVADIKKGKAQKLKTVTELLGITIMERSRFEKNPSAFLESKGYLNIRADKLIILPKYSLFELENGRRRLLASAGELQKGNELALPTQFMKFLYLASRYNESKGKPEEIEKKQEFVNQHVSYFDDILQLINDFSKRVILADANLEKINKLYQDNKENISVDELANNIINLFTFTSLGAPAAFKFFDKIVDRKRYTSTKEVLNSTLIHQSITGLYETRIDLGKLGED

SEQ ID NO: 82 - protein, 1370 aa, Streptococcus agalactiae
MNKPYSIGLDIGTNSVGYSVVTDDYKVPAKKMRVLGNTDKEYIKKNLIGALLFDGGNTASDRRLKRTARRRYTRRRNRILYLQEIFAEEMSKVDDSFFHRLEDSFLVEDDKRGSKYPIFATMQEEKDYHEKFPTIYHLRKELADKKEKANLRLVYLALAHIIKFRGHFLIEDDSFDVRNTDIQRQYQAFLEIFDTTFENNHLLSQNIDVEGILTDKISKSAKKDRILAQYPNQKSTGIFAEFLKLIVGNQADFKKHFNLEDKTPLQFAKDSYDEDLENLLGQIGDEFADLFSVAKKLYDSVLLSGILTVTDLSTKAPLSASMIQRYDEHREDLKQLKQFVKASLPEKYQEIFTDSSKDGYAGYIEGKTNQGAFYKYLSKLLTKQEGSEYFLEKIKNEDFLRKQRTFDNGSIPHQVHLTELKAIIRRQSEYYPFLKENLDRIEKILTFRIPYYVGPLAREKSDFAWMTRKTDDSIRPWNFEELVDKEASAEAFIHRMTNNDLYLPEEKVLPKHSLIYEKFTVYNELTKVRYKNEQGETYFFDSNIKQEIFDGVFKEHRKVSKKKLLDFLAKEYEEFRIVDVIGLDKENKAFNASLGTYHDLKKILDKDFLDNPDNESILEDIVQTLTLFEDREMIKKRLENYKDLFTESQLKKLYRRHYTGWGRLSAKLINGIRDKESQKTILDYLISDGRANRNFMQLIHDDGLSFKPIIDKAQAGSHSDNLKEVVGELAGSPAIKKGILQSLKIVDELVKVMGYEPEQVVVEMARENQTTNKGRRNTRQRYKLLEEGVKNLASDLNGNILKEYPTDNQALQNERLFLYYLQNGRDMYTGEALDIDNLSQYDIDHIVPQAFIKDDSIDNRVLVSSAKNRGKSDNVPSIDIVKARKAFWKKLLDAKLMSQRKYDNLTKAERGGLTSDDKARFIQRQLVETRQITKHVARILDERFNNELDSKGRRIRKVKIVTLKSNLVSNFRKEFGFYKIREVNDYHHAHDAYLNAVVAKAILTKYPQLEPEFVYGDYPKYNSYKTRKSATEKLFFYSNIMNFFKTKVTLADGTVVVKDDIEVNNDTGEIVWDKKKHFATVRKVLSYPQVNIVKKTEIQTGGFSKESILAHGNSDKLIPRKTKDIYLDPKKYGGFDSPIVAYSVLVVADIKKGKAQKLKTVTELLGITIMERFRFEKNPSAFLESKGYLNIRDDKLMILPKYSLFELENGRRRLLASAGELQKGNELALPTQYMKFLYLASRYNELKGKPEEIEQKQEFVVQHVSYFDDILQIINDFSNRVILADANLEKINKLYQDNKENISVDELANNIINLFTFTSLGAPAAFKFFDKIVDRKRYTSTKEVLNSTLIHQSITGLYETRIDLGKLGED

SEQ ID NO: 83 - protein, 1370 aa, Streptococcus agalactiae
MNKPYSIGLDIGTNSVGWSIITDDYKVPAKKMRVLGNTDKEYIKKNLIGALLFDGRNTAADRRLKRTARRRYTRRRNRILYLQEIFAEEMSKVDDSFFHRLEDSFLVEEDKRGSKYPIFATLQEEKDYHEKFSTIYHLRKELADKKEKADLRLIYIALAHIIKFRGHFLIEDDSFDVRNTDISKQYQDFLEIFNTTFENNDLLSQNVDVEAILTDKISKSAKKDRILAQYPNQKSTGIFAEFLKLIVGNQADFKKYFNLEDKTPLQFAKDSYDEDLENLLGQIGDEFADLFSAAKKLYDSVLLSGILTVIDLSTKAPLSASMIQRYDEHREDLKQLKQFVKASLPEKYQEIFADSSKDGYAGYIEGKTNQEAFYKYLSKLLTKQEDSENFLEKIKNEDFLRKQRTFDNGSIPHQVHLTELKAIIRRQSEYYPFLKENQDRIEKILTFRIPYYIGPLAREKSDFAWMTRKTDDSIRPWNFEDLVDKEKSAEAFIHRMTNNDFYLPEEKVLPKHSLIYEKFTVYNELTKVRYKNEQGETYFFDSNIKQEIFDGVFKEHRKVSKKKLLDFLAKEYEEFRIVDVIGLDKENKAFNASLGTYHDLEKILDKDFLDNPDNESILEDIVQTLTLFEDREMIKKRLENYKDLFTESQLKKLYRRHYTGWGRLSAKLINGIRDKESQKTILDYLIDDGRSNRNFMQLINDDGLSFKSIISKAQAGSHSDNLKEVVGELAGSPAIKKGILQSLKIVDELVKVMGYEPEQIVVEMARENQTTNQGRRNSRQRYKLLDDGVKNLASDLNGNILKEYPTDNQALQNERLFLYYLQNGRDMYTGEALDIDNLSQYDIDHIIPQAFIKDDSIDNRVLVSSAKNRGKSDDVPSLEIVKDCKVFWKKLLDAKLMSQRKYDNLTKAERGGLTSDDKARFIQRQLVETRQITKHVARILDERFNNELDSKGRRIRKVKIVTLKSNLVSNFRKEFGFYKIREVNNYHHAHDAYLNAVVAKAILTKYPQLEPEFVYGDYPKYNSYKTRKSATEKLFFYSNIMNFFKTKVTLADGTVVVKDDIEVNNDTGEIVWDKKKHFATVRKVLSYPQNNIVKKTEIQTGGFSKESILAHGNSDKLIPRKTKDIYLDPKKYGGFDSPIVAYSVLVVADIKKGKAQKLKTVTELLGITIMERSRFEKNPSAFLESKGYLNIRADKLIILPKYSLFELENGRRRLLASAGELQKGNELALPTQFMKFLYLASRYNESKGKPEEIEKKQEFVNQHVSYFDDILQLINDFSKRVILADANLEKINKLYQDNKENISVDELANNIINLFTFTSLGAPAAFKFFDKIVDRKRYTSTKEVLNSTLIHQSITGLYETRIDLGKLGED

SEQ ID NO: 84 - protein, 1370 aa, Streptococcus agalactiae
MNKPYSIGLDIGTNSVGWSIITDDYKVPAKKMRVLGNTDKEYIKKNLIGALLFDGGNTAADRRLKRTARRRYTRRRNRILYLQEIFAEEMSKVDDSFFHRLEDSFLVEEDKRGSKYPIFATMQEEKYYHEKFPTIYHLRKELADKKEKADLRLIYLALAHIIKFRGHFLIEDDSFDVRNTDIQKQYQAFLEIFDTTFENNDLLSQNVDVEAILTDKISKSAKKDRILARYPNQKSTGIFAEFLKLIVGNQADFKKHFNLEDKTPLQFAKDSYDEDLENLLGQIGDEFADLFSAAKKLYDSVLLSGILTVTDLSTKAPLSASMIQRYDEHREDLKQLKQFVKASLPEKYQEIFADSSKDGYAGYIEGKTNQEAFYKYLSKLLTKQEGSEYLLEKIKNEDFLRKQRTFDNGSIPHQVHLTELRAIIRRQSEYYPFLKENLDRIEKILTFRIPYYVGPLAREKSDFAWMTRKTDDSIRPWNFEDLVDKEKSAEAFIHRMTNNDLYLPEEKVLPKHSLIYEKFTVYNELTKVRFLAEGFKDFQFLNRKQKETIFNSLFKEKRKVTEKDIISFLNKVDGYEGIAIKGIEKQFNASLSTYHDLKKILGKDFLDNTDNELILEDIVQTLTLFEDREMIRKRLDIYKDFFTESQLKKLYRRHYTGWGRLSAKLINGIRNKENQKTILDYLIDDGSANRNFMQLIKDAGLSFKPIIDKARTGSHSDNLKEVVGELAGSPAIKKGILQSLKIVDELVKVMGYEPEQIVVEMARENQTTAKGLSRSRQRLTTLRESLANLKSNILEEKKPKYVKDQVENHHLSDDRLFLYYLQNGKDMYTDDELDIDNLSQYDIDHIIPQAFIKDDSIDNRVLVSSAKNRGKSDDVPSVEIVKDCKVFWKKLLDAKLMSQRKYDNLTKAERGGLTSDDKARFIQRQLVETRQITKHVARILDERFNNELDSKGRRIRKVKIVTLKSNLVSNFRKEFGFYKIREVNNYHHAHDAYLNAVVAKAILTKYPQLEPEFVYGDYPKYNSYKTRKSATEKLFFYSNIMNFFKTKVTLADGTVVVKDDIEVNNDTGEIVWDKKKHFATVRKVLSYPQVNIVKKTEIQTGGFSKESILAHGNSDKLIPRKTKDIYLDPKKYGGFDSPIVAYSVLVVADIKKGKAQKLKTVTELLGITIMERSRFEKNPSAFLESKGYLNIRDDKLMILPKYSLFELENGRRRLLASAGELQKGNELALPTQFMKFLYLASRYNELKGKPEEIEQKQEFVVQHVSYFDDILQIINDFSNRVILADANLEKINKLYQDNKENIPVDELANNIINLFTFTSLGAPAAFKFFDKIVDRKRYTSTKEVLNSTLIHKSITGLYETRIDLGKLGED

SEQ ID NO: 85 - protein, 1370 aa, Streptococcus agalactiae
MNKPYSIGLDIGTNSVGWSIITDDYKVPAKKMRVLGNTDKEYIKKNLIGALLFDGGNTAADRRLKRTARRRYTRRRNRILYLQEIFAEEMSKVDDSFFHRLEDSFLVEEDKRGSKYPIFATLQEEKDYHEKFSTIYHLRKELADKKEKADLRLIYIALAHIIKFRGHFLIEDDSFDVRNTDISKQYQDFLEIFNTTFENNDLLSQNVDVEAILTDKISKSAKKDRILAQYPNQKSTGIFAEFLKLIVGNQADFKKYFNLEDKTPLQFAKDSYDEDLENLLGQIGDEFADLFSAAKKLYDSVLLSGILTVIDLSTKAPLSASMIQRYDEHREDLKQLKQFVKASLPEKYQEIFADSSKDGYAGYIEGKTNQEAFYKYLSKLLTKQEDSENFLEKIKNEDFLRKQRTFDNGSIPHQVHLTELKAIIRRQSEYYPFLKENQDRIEKILTFRIPYYIGPLAREKSDFAWMTRKTDDSIRPWNFEDLVDKEKSAEAFIHRMTNNDFYLPEEKVLPKHSLIYEKFTVYNELTKVRYKNEQGETYFFDSNIKQEIFDGVFKEHRKVSKKKLLDFLAKEYEEFRIVDVIGLDKENKAFNASLGTYHDLEKILDKDFLDNPDNESILEDIVQTLTLFEDREMIKKRLENYKDLFTESQLKKLYRRHYTGWGRLSAKLINGIRDKESQKTILDYLIDDGRSNRNFMQLINDDGLSFKSIISKAQAGSHSDNLKEVVGELAGSPAIKKGILQSLKIVDELVKVMGYEPEQIVVEMARENQTTNQGRRNSRQRYKLLDDGVKNLASDLNGNILKEYPTDNQALQNERLFLYYLQNGRDMYTGEALDIDNLSQYDIDHIIPQAFIKDDSIDNRVLVSSAKNRGKSDDVPSLEIVKDCKVFWKKLLDAKLMSQRKYDNLTKAERGGLTSDDKARFIQRQLVETRQITKHVARILDERFNNELDSKGRRIRKVKIVTLKSNLVSNFRKEFGFYKIREVNNYHHAHDAYLNAVVAKAILTKYPQLEPEFVYGDYPKYNSYKTRKSATEKLFFYSNIMNFFKTKVTLADGTVVIKDDIEVNNDTGEIVWDKKKHFATVRKVLSYPQNNIVKKTEIQTGGFSKESILAHGNSDKLIPRKTKDIYLDPKKYGGFDSPIVAYSVLVVADIKKGKAQKLKTVTELLGITIMERSRFEKNPSAFLESKGYLNIRADKLIILPKYSLFELENGRRRLLASAGELQKGNELALPTQFMKFLYLASRYNESKGKPEEIEKKQEFVNQHVSYFDDILQLINDFSKRVILADANLEKINKLYQDNKENISVDELANNIINLFTFTSLGAPAAFKFFDKIVDRKRYTSTKEVLNSTLIHQSITGLYETRIDLGKLGED

SEQ ID NO: 86 - protein, 1370 aa, Streptococcus agalactiae
MNKPYSIGLDIGTNSVGWSIITDDYKVPAKKMRVLGNTDKEYIKKNLIGALLFDGGNTAADRRLKRTARRRYTRRRNRILYLQEIFAEEMSKVDDSFFHRLEDSFLVEEDKRGSKYPIFATLQEEKDYHEKFSTIYHLRKELADKKEKADLRLIYIALAHIIKFRGHFLIEDDSFDVRNTDISKQYQDFLEIFNTTFENNDLLSQNVDVEAILTDKISKSAKKDRILAQYPNQKSTGIFAEFLKLIVGNQADFKKYFNLEDKTPLQFAKDSYDEDLENLLGQIGDEFADLFSAAKKLYDSVLLSGILTVIDLSTKAPLSASMIQRYDEHREDLKQLKQFVKASLPEKYQEIFADSSKDGYAGYIEGKTNQEAFYKYLSKLLTKQEDSENFLEKIKNEDFLRKQRTFDNGSIPHQVHLTELKAIIRRQSEYYPFLKENQDRIEKILTFRIPYYIGPLAREKSDFAWMTRKTDDSIRPWNFEDLVDKEKSAEAFIHRMTNNDFYLPEEKVLPKHSLIYEKFTVYNELTKVRYKNEQGETYFFDSNIKQEIFDGVFKEHRKVSKKKLLDFLAKEYEEFRIVDVIGLDKENKAFNASLGTYHDLEKILDKDFLDNPDNESILEDIVQTLTLFEDREMIKKRLENYKDLFTESQLKKLYRRHYTGWGRLSAKLINGIRDKESQKTILDYLIDDGRSNRNFMQLINDDGLSFKSIISKAQAGSHSDNLKEVVGELAGSPAIKKGILQSLKIVDELVKVMGYEPEQIVVEMARENQTTNQGRRNSRQRYKLLDDGVKNLASDLNGNILKEYPTDNQALQNERLFLYYLQNGRDMYTGEALDIDNLSQYDIDHIIPQAFIKDDSIDNRVLVSSAKNRGKSDDVPSLEIVKDCKVFWKKLLDAKLMSQRKYDNLTKAERGGLTSDDKARFIQRQLVETRQITKHVASILDERFNNELDSKGRRIRKVKIVTLKSNLVSNFRKEFGFYKIREVNNYHHAHDAYLNAVVAKAILTKYPQLEPEFVYGDYPKYNSYKTRKSATEKLFFYSNIMNFFKTKVTLADGTVVVKDDIEVNNDTGEIVWDKKKHFATVRKVLSYPQNNIVKKTEIQTGGFSKESILAHGNSDKLIPRKTKDIYLDPKKYGGFDSPIVAYSVLVVADIKKGKAQKLKTVTELLGITIMERSRFEKNPSAFLESKGYLNIRADKLIILPKYSLFELENGRRRLLASAGELQKGNELALPTQFMKFLYLASRYNESKGKPEEIEKKQEFVNQHVSYFDDILQLINDFSKRVILADANLEKINKLYQDNKENISVDELANNIINLFTFTSLGAPAAFKFFDKIVDRKRYTSTKEVLNSTLIHQSITGLYETRIDLGKLGED

SEQ ID NO: 87 - protein, 1370 aa, Streptococcus agalactiae
MNKPYSIGLDIGTNSVGYSVVTDDYKVPAKKMRVLGNTDKEYIKKNLIGALLFDGGNTASDRRLKRTARRRYTRRRNRILYLQEIFAEEMSKVDDSFFHRLEDSFLVEDDKRGSKYPIFATMQEEKDYHEKFPTIYHLRKELADKKEKANLRLVYLALAHIIKFRGHFLIEDDSFDVRNTDIQRQYQAFLEIFDTTFENNHLLSQNIDVEGILTDKISKSAKKDRILAQYPNQKSTGIFAEFLKLIVGNQADFKKHFNLEDKTPLQFAKDSYDEDLENLLGQIGDEFADLFSVAKKLYDSVLLSGILTVTDLSTKAPLSASMIQRYDEHREDLKQLKQFVKASLPEKYQEIFTDSSKDGYAGYIESKTNQGAFYKYLSKLLTKQEGSEYFLEKIKNEDFLRKQRTFDNGSIPHQVHLTELKAIIRRQSEYYPFLKENLDRIEKILTFRIPYYVGPLAREKSDFAWMTRKTDDSIRPWNFEELVDKEASAEAFIHRMTNNDLYLPEEKVLPKHSLIYEKFTVYNELTKVRYKNEQGETYFFDSNIKQEIFDGVFKEHRKVSKKKLLDFLAKEYEEFRIVDVIGLDKENKAFNASLGTYHDLKKILDKDFLDNPDNESILEDIVQTLTLFEDREMIKKRLENYKDLFTESQLKKLYRRHYTGWGRLSAKLINGIRDKESQKTILDYLISDGRANRNFMQLIHDDGLSFKPIIDKAQAGSHSDNLKEVVGELAGSPAIKKGILQSLKIVDELVKVMGYEPEQVVVEMARENQTTNQGRRNTRQRYKLLEEGVKNLASDLNGNILKEYPTDNQALQNERLFLYYLQNGRDMYTGEALDIDNLSQYDIDHIVPQAFIKDDSIDNRVLVSSAKNRGKSDNVPSIDIVKARKAFWKKLLDAKLMSQRKYDNLTKAERGGLTSDDKARFIQRQLVETRQITKHVARILDERFNNELDSKGRRIRKVKIVTLKSNLVSNFRKEFGFYKIREVNDYHHAHDAYLNAVVAKAILTKYPQLEPEFVYGDYPKYNSYKTRKSATEKLFFYSNIMNFFKTKVTLADGTVVVKDDIEVNNDTGEIVWDKKKHFATVRKVLSYPQVNIVKKTEIQTGGFSKESILAHGNSDKLIPRKTKDIYLDPKKYGGFDSPIVAYSVLVVADIKKGKAQKLKTVTELLGITIMERFRFEKNPSAFLESKGYLNIRDDKLMILPKYSLFELENGRRRLLASAGELQKGNELALPTQYMKFLYLASRYNELKGKPEEIEQKQEFVVQHVSYFDDILQIINDFSNRVILADANLEKINKLYQDNKENISVDELANNIINLFTFTSLGAPAAFKFFDKIVDRKRYTSTKEVLNSTLIHQSITGLYETRIDLGKLGED

SEQ ID NO: 88 - protein, 1370 aa, Streptococcus agalactiae
MNKPYSIGLDIGTNSVGWSIITDDYKVPAKKMRVLGNTDKEYIKKNLIGALLFDGGNTAADRRLKRTARRRYTRRRNRILYLQEIFAEEMSKVDDSFFHRLEDSFLVEEDKRGSKYPIFATLQEEKDYHEKFSTIYHLRKELADKKEKADLRLIYIALAHIIKFRGHFLIEDDSFDVRNTDISKQYQDFLEIFNTTFENNDLLSQNVDVEAILTDKISKSAKKDRILAQYPNQKSTGIFAEFLKLIVGNQADFKKYFNLEDKTPLQFAKDSYDEDLENLLGQIGDEFADLFSAAKKLYDSVLLSGILTVIDLSTKAPLSASMIQRYDEHREDLKQLKQFVKASLPEKYQEIFADSSKDGYAGYIEGKTNQEAFYKYLSKLLTKQEDSENFLEKIKNEDFLRKQRTFDNGSIPHQVHLTELKAIIRRQSEYYPFLKENQDRIEKILTFRIPYYIGPLAREKSDFAWMTRKTDDSIRPWNFEDLVDKEKSAEAFIHRMTNNDFYLPEEKVLPKHSLIYEKFTVYNELTKVRYKNEQGETYFFDSNIKQEIFDGVFKEHRKVSKKKLLDFLAKEYEEFRIVDVIGLDKENKAFNASLGTYHDLEKILDKDFLDNPDNESILEDIVQTLTLFEDREMIKKRLENYKDLFTESQLKKLYRRHYTGWGRLSAKLINGIRDKESQKTILDYLIDDGRSNRNFMQLINDDGLSFKSIISKAQAGSHSDNLKEVVGELAGSPAIKKGILQSLKIVDELVKVMGYEPEQIVVEMARENQTTNQGRRNSRQRYKLLDDGVKNLASDLNGNILKEYPTDNQALQNERLFLYYLQNGRDMYTGEALDIDNLSQYDIDHIIPQAFIKDDSIDNRVLVSSAKNRGKSDDVPSLEIVKDCKVFWKKLLDAKLMSQRKYDNLTKAERGGLTSDDKARFIQRQLVETRQITKHVARILDERFNNELDSKGRRIRKVKIVTLKSNLVSNFRKEFGFYKIREVNNYHHAHDAYLNAVVAKAILTKYPQLEPEFVYGDYPKYNSYKTRKSATEKLFFYSNIMNFFKTKVTLADGTVVVKDDIEVNNDTGEIVWDKKKHFATVRKVLSYPQNNIVKKTEIQTGGFSKESILAHGNSDKLIPRKTKDIYLDPKKYGGFDSPIVAYSVLVVADIKKGKAQKLKTVTELLGITIMERSRFEKNLSAFLESKGYLNIRADKLIILPKYSLFELENGRRRLLASAGELQKGNELALPTQFMKFLYLASRYNESKGKPEEIEKKQEFVNQHVSYFDDILQLINDFSKRVILADANLEKINKLYQDNKENISVDELANNIINLFTFTSLGAPAAFKFFDKIIDRKRYTSTKEVLNSTLIHQSITGLYETRIDLGKLGED

SEQ ID NO: 89 - protein, 1370 aa, Streptococcus agalactiae
MNKPYSIGLDIGTNSVGWSIITDDYKVPAKKMRVLGNTDKEYIKKNLIGALLFDGGNTAADRRLKRTARRRYTRRRNRILYLQEIFAEEMSKVDDSFFHRLEDSFLVEEDKRGSKYPIFATLQEEKDYHEKFSTIYHLRKELADKKEKADLRLIYIALAHIIKFRGHFLIEDDSFDVRNTDISKQYQDFLEIFNTTFENNDLLSQNVDVEAILTDKISKSAKKDRILAQYPNQKSTGIFAEFLKLIVGNQADFKKYFNLEDKTPLQFAKDSYDEDLENLLGQIGDEFADLFSAAKKLYDSVLLSGILTVIDLSTKAPLSASMIQRYDEHREDLKQLKQFVKASLPEKYQEIFADSSKDGYAGYIEGKTNQEAFYKYLSKLLTKQEDSENFLEKIKNEDFLRKQRTFDNGSIPHQVHLTELKDIIRRQSEYYPFLKENQDRIEKILTFRIPYYIGPLAREKSDFAWMTRKTDDSIRPWNFEDLVDKEKSAEAFIHRMTNNDFYLPEEKVLPKHSLIYEKFTVYNELTKVRYKNEQGETYFFDSNIKQEIFDGVFKEHRKVSKKKLLDFLAKEYEEFRIVDVIGLDKENKAFNASLGTYHDLEKILDKDFLDNPDNESILEDIVQTLTLFEDREMIKKRLENYKDLFTESQLKKLYRRHYTGWGRLSAKLINGIRDKESQKTILDYLIDDGRSNRNFMQLINDDGLSFKSIISKAQAGSHSDNLKEVVGELAGSPAIKKGILQSLKIVDELVKVMGYEPEQIVVEMARENQTTNQGRRNSRQRYKLLDDGVKNLASDLNGNILKEYPTDNQALQNERLFLYYLQNGRDMYTGEALDIDNLSQYDIDHIIPQAFIKDDSIDNRVLVSSAKNRGKSDDVPSLEIVKDCKVFWKKLLDAKLMSQRKYDNLTKAERGGLTSDDKARFIQRQLVETRQITKHVARILDERFNNELDSKGRRIRKVKIVTLKSNLVSNFRKEFGFYKIREVNNYHHAHDAYLNAVVAKAILTKYPQLEPEFVYGDYPKYNSYKTRKSATEKLFFYSNIMNFFKTKVTLADGTVVVKDDIEVNNDTGEIVWDKKKHFATVRKVLSYPQNNIVKKTEIQTGGFSKESILAHGNSDKLIPRKTKDIYLDPKKYGGFDSPIVAYSVLVVADIKKGKAQKLKTVTELLGITIMERSRFEKNPSAFLESKGYLNIRADKLIILPKYSLFELENGRRRLLASAGELQKGNELALPTQFMKFLYLASRYNESKGKPEEIEKKQEFVNQHVSYFDDILQLINDFSKRVILADANLEKINKLYQDNKENISVDELANNIINLFTFTSLGAPAAFKFFDKIVDRKRYTSTKEVLNSTLIHQSITGLYETRIDLGKLGED

SEQ ID NO: 90 - protein, 1370 aa, Streptococcus agalactiae
MNKPYSIGLDIGTNSVGWSIITDDYKVPAKKMRVLGNTDKEYIKKNLIGALLFDGGNTAADRRLKRTARRRYTRRRNRILYLQEIFAEEMSKVDDSFFHRLEDSFLVEEDKRGSKYPIFATMQEEKDYHEKFPTIYHLRKELADKKEKADLRLVYLALAHIIKFRGHFLIEDDRFDVRNTDIQKQYQAFLEIFDTSFENNHLLSQNVDVEAILTDKISKSAKKDRILAQYPNQKSTGIFAEFLKLIVGNQADFKKHFNLEDKTPLQFAKDSYDEDLENLLGQIGDEFADLFSAAKKLYDSVLLSGILTVTDLSTKAPLSASMIQRYDEHREDLKQLKQFVKASLPEKYQEIFADSSKDGYAGYIEGKTNQEAFYKYLSKLLTKQEDSEYFLEKIKNEDFLRKQRTFDNGSIPHQVHLTELKAIIRRQSEYYPFLKENQDKIEKILTFRIPYYVGPLARGNSDFAWMTRKTDDSIRPWNFEDLVDKEKSAEAFIHRMTNNDLYLPEEKVLPKHSLIYEKFTVYNELTKVRYKNEQGETYFFDSNVKQEIFDGVFKEHRKVSKKQLLDFLAKEFEEFRIVDVTGLDKENKAFNASLGTYHDLKKILDKDFLDNPDNESILEDIVQTITLFEDREMIKKRLENYKDLFTESQLKKLYRRHYTGWGRLSAKLINGIRDRESQKIILDYLISDGRANRNFMQLINDDGLSFKSIISKAQSGSHSDNLKEVVGELAGSPAIKKGILQSLKIVDELVKVMGYEPEQIVVEMARENQTTNQGRRNSRQRYKLLEDGVKNLASDLNGDILKEYPTDNQALQNERLFLYYLQNGRDMYTGEALDIDSLSQYDIDHIVPQAFIKDDSIDNRVLVSSAKNRGKSDDVPSIDIVKARKAFWKKLLDAKLISQRKYDNLTKAERGGLTPDDKAGFIQRQLVETRQITKHVARILDERFNNKVDDNNKPIRKVKIVTLKSNLVSNFRKEFGFYKIREVNNYHHAHDAYLNAVVAKAILTKYPQLEPEFVYGDYPKYNSYKTRKSATEKLFFYSNIMNFFKTKVTLADETVVVKDDIEVNNETGEIAWDKKKHFATVRKVLSYPQVNIVKKTEVQTGGFSKESILAHSNSDKLIPRKTKDIYLDPKKYGGFDSPIVAYSVLVLADIKKGKAQKLKTVKELIGITIMERERFEKNPSAFLESKGYLNIRTDKLIILPKYSLFELENGRRRLLASAGELQKGNELALPTQYMKFLYLASRYNESKGKPEEIEKKQEFVNQHVSYFDDILQLINDFSKRVILADANLEKINKLYSDNKDNTPVDELAKNIINLFTFTSLGAPAAFKFFDKSVDRKRYTSTKEVLDSTLIHQSITGLYETRIDLGKLGED

SEQ ID NO: 91 - protein, 1370 aa, Streptococcus agalactiae
  VARIANT 9: note = Any amino acid
MNKPYSIGXDIGTNSVGWSIITDDYKVPAKKMRVLGNTDKEYIKKNLIGALLFDGGNTAADRRLKRTARRRYTRRRNRILYLQEIFAEEMSKVDDSFFHRLEDSFLVEEDKRGSKYPIFATLQEEKDYHEKFSTIYHLRKELADKKEKADLRLIYIALAHIIKFRGHFLIEDDSFDVRNTDISKQYQDFLEIFNTTFENNDLLSQNVDVEAILTDKISKSAKKDRILAQYPNQKSTGIFAEFLKLIVGNQADFKKYFNLEDKTPLQFAKDSYDEDLENLLGQIGDEFADLFSAAKKLYDSVLLSGILTVIDLSTKAPLSASMIQRYDEHREDLKQLKQFVKASLPEKYQEIFADSSKDGYAGYIEGKTNQEAFYKYLSKLLTKQEDSENFLEKIKNEDFLRKQRTFDNGSIPHQVHLTELKAIIRRQSEYYPFLKENQDRIEKILTFRIPYYIGPLAREKSDFAWMTRKTDDSIRPWNFEDLVDKEKSAEAFIHRMTNNDFYLPEEKVLPKHSLIYEKFTVYNELTKVRYKNEQGETYFFDSNIKQEIFDGVFKEHRKVSKKKLLDFLAKEYEEFRIVDVIGLDKENKAFNASLGTYHDLEKILDKDFLDNPDNESILEDIVQTLTLFEDREMIKKRLENYKDLFTESQLKKLYRRHYTGWGRLSAKLINGIRDKESQKTILDYLIDDGRSNRNFMQLINDDGLSFKSIISKAQAGSHSDNLKEVVGELAGSPAIKKGILQSLKIVDELVKVMGYEPEQIVVEMARENQTTNQGRRNSRQRYKLLDDGVKNLASDLNGNILKEYPTDNQALQNERLFLYYLQNGRDMYTGEALDIDNLSQYDIDHIIPQAFIKDDSIDNRVLVSSAKNRGKSDDVPSLEIVKDCKVFWKKLLDAKLMSQRKYDNLTKAERGGLTSDDKARFIQRQLVETRQITKHVARILDERFNNELDSKGRRIRKVKIVTLKSNLVSNFRKEFGFYKIREVNNYHHAHDAYLNAVVAKAILTKYPQLEPEFVYGDYPKYNSYKTRKSATEKLFFYSNIMNFFKTKVTLADGTVVVKDDIEVNNDTGEIVWDKKKHFATVRKVLSYPQNNIVKKTEIQTGGFSKESILAHGNSDKLIPRKTKDIYLDPKKYGGFDSPIVAYSVLVVADIKKGKAQKLKTVTELLGITIMERSRFEKNPSAFLESKGYLNIRADKLIILPKYSLFELENGRRRLLASAGELQKGNELALPTQFMKFLYLASRYNESKGKPEEIEKKQEFVNQHVSYFDDILQLINDFSKRVILADANLEKINKLYQDNKENISVDELANNIINLFTFTSLGAPAAFKFFDKIVDRKRYTSTKEVLNSTLIHQSITGLYETRIDLGKLGED

SEQ ID NO: 92 - protein, 1370 aa, Streptococcus agalactiae
MNKPYSIGLDIGTNSVGWSIITDDYKVPAKKMRVLGNTDKEYIKKNLIGALLFDGGNTAADRRLKRIARRRYTRRRNRILYLQEIFAEKMSKVDDSFFHRLEDSFLVEEDKRGSKYPIFATLQEEKDYHEKFPTIYHLRKELADKKEKADLRLVYLALAHIIKFRGHFLIEDDRFDVRNTDIQKQYQAFLEIFDTTFENNHLLSQNVDVEAILTDKISKSAKKDRILAQYPDQKSTGIFAEFLKLIVGNQADFKKHFNLEDKTPLQFAKDSYDEDLENLLGQIGDEFADLFSAAKKLYDSVLLSGILTVTDLSTKAPLSASMIQRYDEHREDLKQLKQFVKASLPEKYQEIFADSSKDGYAGYIEGKTNQEAFYKYLSKLLTKQEGSEYLLEKIKNEDFLRKQRTFDNGSIPHQVHLTELRAIIRRQSEYYPFLKENLDRIEKILTFRIPYYVGPLAREKSDFAWMTRKTDDSIRPWNFEELVDKEASAEAFIHCMTNNDLYLPEEKVLPKHSLIYEKFTVYNELTKVRYKNEQGETYFFDSNIKQEIFDGVFKEYRKVSKKQLLDFLAKEFEEFRIVDVTGLDKENKAFNASLGTYHDLEKILGKDFLDNPDNESILEDIVQTLTLFEDREMIKKRLDIYKDFFTESQLKKLYRRHYTGWGRLSAKLINGIRNKENQKTILDYLIDDGSANRNFMQLIKDAGLSFKSIISKAQSGSHSDNLKEVVSELAGSPAIKKGILQSLKIVDELVKVMGYKPEQIVVEMARENQTTNQGRRNSRQRYKLLDDGVRNLASDLNGNILKEYPTDNQALQNERLFLYYLQNGRDMYTEKALDIDNLSQYDIDHIIPQAFIKDDSIDNRVLVSSAKNRGKSDDVPSLEIVKDCKVFWKKLLDAKLMSQRKYDNLTKAERGGLTSDDKARFIQRQLVETRQITKHVARILDERFNNELDSKGRRIRKVKIVTLKSNLVSNFRKEFGFYKIREVNDYHHAHDAYLNAVVAKAILTKYPQLEPEFVYGDYPKYNSYKTRKSATEKLFFYSNIMNFFKTKVTLADGTVVVKDDIEVNNDTGEIVWDKKKHFATVRKVLSYPQNNIVKKTEIQTGGFSKESILAHGNSDKLIPRKTKDIYLDPKKYGGFDSPIVAYSVLVVADIKKGKAQKLKTVTELLGITIMERSRFEKNPSAFLESKGYLNIRTDKLIILPKYSLFELENGRRRLLASAGELQKGNELALPTQFMKFLYLASRYNESKGKPEEIEKKQEFVNQHVSYFDDILQIINDFSNRVILADANLEKINKLYQDNKENISVDELANNIINLFTFTSLGAPAAFKFFDKIVDRKRYTSTKEVLNSTLIHQSITGLYETRIDLGKLGED

SEQ ID NO: 93 - protein, 1386 aa, Streptococcus anginosus
MNQKYSIGLDIGTNSVGWAVITDDYKVPAKKMKVLGNTDKQSIKKNLLGALLFDSGETAEATRLKRTARRRYTRRRNRLRYLQEIFAEEMMQVDESFFQRLDDSFLVDEDKRGERHPIFGNIAAEVKYHDEFPTIYHLRKHLADISQKADLRLVYLALAHMIKFRGHFLIEGQLKAENTNVQALFKDFVEVYDKTVEESHLSEITVDALSILTEKVSKSRRLENLIAHYPAEKKNTLFGNLIALFLGLQPNFKTNFQLSEDAKLQFSKDTYEEDLEGLLGEVGDEYADLFASAKNLYDAILLSGILTVDDNSTKAPLSASMVKRYEEHQKDLKKFEDFIKVNALDQYNAIFKDKNKKGYAGYIESGVKQDEFYKYLKGILLQINGSGDFLDKIDREDFLRKQRTFDNGSIPHQIHLQEMHAILRRQGEHYPFLKENQDKIEKILTFRIPYYVGPLARKGSRFAWAEYKADEKITPWNFDDILDKEKSAEKFITRMTLNDLYLPEEKVLPKHSLLYETFTVYNELTKVKYVNEQGEAKFFDANMKQEIFDHVFKENRKVTKDKLLNYLNKEFEEFRIVNLTGLDKENKVFNSSLGTYHDLRKILNKSFLDNKENAQIIEDIIQTLTLFEDREMIRQRLQKYSDIFTKAQLKKLERRHYTGWGRLSYKLINGIRNKENKKTILDYLIDDGYANRNFMQLINDDALSFKEEIAKAQIIGDVDDIANVVHDLPGSPAIKKGILQSVKIVDELVKVMGHNPANIIIEMARENQTTDRGRRNSQQRLKLLQDSLKNLDNPVNIKNVENQQLQNDRLFLYYIQNGKDMYTGETLDINNLSQYDIDHIIPQAYIKDDSFDNRVLTSSSENRGKSDNVPSIEVVCARKADWMRLRKAGLISQRKFDNLTKAERGGLTENDKAGFIKRQLVETRQITKHVAQVLDARFNAKHDENKKVIRDVKIITLKSNLVSQFRKDFKFYKVREINDYHHAHDAYLNAVIGTALLKKYPKLASEFVYGEFKKYDVRKFIAKSDKEIGKATAKYFFYSNLMNFFKKEVKFADGTVVERPDIETSEDGEIAWNKQTDFKIVRKVLSYPQVNIVKKTEVQTHGLDRGKPRGLFNANPSPKPKPDSSENLVGVKRNLDPKKYGGYAGISNSYAVLVKAIIEKGVKKKETMVLEFQGISILDRITFEKDKRAFLLGKGYKDIKKIIELPKYSLFELKDGSRRMLASILSTNNKRGEIHKGNELFVPQKFTTLLYHAKRINNPINKDHIEYVKKHRDDFKELLNYVLEFNEKYVGATKNGERLKEAVADFDSKSNEEICTSFLGAVNSKNAGLFELTSLGSASDFEFLGVKIPRYRDYTPSSLLKDSTLIHQSITGLYETRIDLSKLGED

SEQ ID NO: 94 - protein, 1346 aa, Streptococcus anginosus
MMKKEYSIGLDIGTNSVGWAVITDDYKVPAKKMKVLGNTDKQSIKKNLLGALLFDSGETAEATRLKRTARRRYTRRKNRLRYLQEIFTEEMNKVDENFFQRLDDSFLVEEDKQGSKYPIFGTLKEEKEYHKKFKTIYHLREELANSKEKADLRLVYLALAHMIKFRGHFLYEGDLKAENTDVQALFKDFVEEYDKTIEESHLSEITVDALSILTEKVSKSSRLENLIAHYPTEKKNTLFGNLIALSLGLQPNFKTNFQLSEDAKLQFSKDTYEEDLEELLGEIGDEYADLFASAKNLYDAILLSGILAVDDNTTKAPLSASMVKRYEEHQKDLKKLKDFIKVNAPDQYNAIFKDKNKKGYAGYIESGVEQDEFYKYLKGILLKINGSGDFLDKIDCEDFLRKQRTFDNGSIPHQIHLQEMHAILRRQGEHYPFLKENQDKIEKILTFRIPYYVGPLARKGSRFAWAEYKADEKITPWNFDDILDKEKSAEKFITRMTLNDLYLPEEKVLPKHSPLYETFTVYNELTKVKYVNEQGEAKFFDTNMKQEIFDHVFKENRKVTKDKLLNYLNKEFEEFRIVNLTGLDKENKAFNSSLGTYHDLRKILDKSFLDDKANEKTIEDIIQTLTLFEDREMIRQRLQKYSDIFTKAQLKKLERRHYTGWGRLSYKLINGIRNKENKKTILDYLIDDGYANRNFMQLINDDALSFKEEIARAQIIGDVDDIANVVHDLPGSPAIKKGILQSVKIVDELVKVMGHNPANIIIEMARENQTTDKGRRNSQQRLKLLQDSLKNLDNPVNIKNVENQQLQNDRLFLYYIQNGKDMYTGETLDINNLSQYDIDHIIPQAFIKDNSLDNRVLTRSDKNRGKSDDVPSIEVVHEMKSFWSKLLSVKLITQRKFDNLTKAERGGLTEEDKAGFIKRQLVETRQITKHVAQILDERFNTEFDGAQRRIRNVKIITLKSNLVSNFRKEFELYKVREINDYHHAHDAYLNAVVGNALLLKYPQLEPEFVYGEYPKYNSYRSRKSATEKFLFYSNILRFFKKEDIQTNEDGEIAWNKEKHIKILRKVLSYPQVNIVKKTEEQTGGFSKESILPKGESDKLIPRKTKNSYWNPKKYGGFDSPVVAYSILVFADVEKGKSKKLRKVQDMVGITIMEKKRFEKNPVDFLEQRGYRNVRLEKIIKLPKYSLFELENKRRRLLASARELQKGNELVIPQRFTTLLYHSYQIEKNYEPEHREYVEKHKDEFKELLEYISVFSRKYVLADNNLTKIEMLFSKNKDAEVSSLAKSFISLLTFTAFGAPAAFNFFGENIDRKRYTSVTECLNATLIHQSITGLYETRIDLSKLGED

SEQ ID NO: 95 - protein, 1346 aa, Streptococcus anginosus
MMKKEYSIGLDIGTNSVGWAVITDDYKVPAKKMKVLGNTDKQSIKKNLLGALLFDSGETAEATRLKRTARRRYTRRRNRLRYLQEIFAEEMMQVDESFFQRLDDSFLVEEDKRGSRYPIFGNIAAEVKYHDDFPTIYHLRKHLVDISQKADLRLVYLALAHMIKFRGHFLIEGQLKAENTNVQALFKDFVEVYDKTVEESHLSEMTVDALSILTEKVSKSRRLENLVECYPTEKKNTLFGNLIALSLGLQPNFKTNFQLSEDAKLQFSKDTYEEDLEGLLGEIGDEYADLFASAKNLYDAILLSGILAVDDNTTKAPLSASMVKRYEEHQKDLKKLKDFIKVNAPAQYDDIFKDETKNGYAGYIENGVKQDEFYKYLKNTLSKIDGSDYFLDKIDREDFLRKQRTFDNGSIPHQIHLQEMHAILRRQGEHYPFLKENQDKIEKILTFRIPYYVGPLARKGSRFAWAEYKADEKITPWNFDDILDKEKSAEKFITRMTLNDLYLPEEKVLPKHSPLYETFTVYNELTKVKYVNEQGEAKFFDTNMKQEIFDHVFKENRKVTKDKLLNYLNKEFEEFRIVNLTGLDKENKAFNASLGTYHDLRKILDKSFLDDKVNEKIIEDIIQTLTLFEDREMIRQRLQKYSDIFTTQQLKKLERRHYTGWGRLSYKLINGIRNKENKKTILDYLIDDGYANRNFMQLINDDALSFKEEIARAQIIGDVDDIANVVHDLPGSPAIKKGILQSVKIVDELVKVMGHNPANIIIEMARENQTTDKGRRNSQQRLKLLQDSLKNLDNPVNIKNVENQQLQNDRLFLYYIQNGKDMYTGETLDINNLSQYDIDHIIPQAFIKDNSLDNRVLTRSDKNRGKSDDVPSIEVVHEMKSFWSKLLSVKLITQRKFDNLTKAERGGLTEEDKAGFIKRQLVETRQITKHVAQILDERFNTEFDGAQRRIRNVKIITLKSNLVSNFRKEFELYKVREINDYHHAHDAYLNAVVGNALLLKYPQLEPEFVYGEYPKYNSYRSRKSATEKFLFYSNILRFFKKEDIQTNEDGEIAWNKEKHIKILRKVLSYPQVNIVKKTEEQTGGFSKESILPKGESDKLIPRKTKNSYWNPKKYGGFDSPVVAYSILVFADVEKGKSKKLRKVQDMVGITIMEKKRFEKHPVDFLEQRGYRNVRLEKIIKLPKYSLFELENKRRRLLASARELQKGNELVIPQRFTTLLYHSYRIEKDYEPEHREYVEKHKDEFKELLEYISVFSRKYVLADNNLTKIEMLFSKNKDAEVSSLAKSFISLLTFTAFGAPAAFNFFGENIDRKRYTSVTECLNATLIHQSITGLYETRIDLSKLGED

SEQ ID NO: 96 - protein, 1345 aa, Streptococcus anginosus
MKKEYSIGLDIGTNSVGWAVITDDYKVPAKKMKVLGNTDKQSIKKNLLGALLFDSGETAEATRLKRTARRRYTRRKNRLRYLQEIFTEEMNKVDENFFQRLDDSFLVEEDKQGSKYPIFGTLKEEKEYHKKFKTIYHLREELANSKEKADLRLVYLALAHMIKFRGHFLYEGDLKAENTDVQALFKDFVEEYDKTIEESHLSEITVDALSILTEKVSKSSRLENLIAHYPTEKKNTLFGNLIALSLGLQPNFKTNFQLSEDAKLQFSKDTYEEDLEELLGEIGDEYADLFASAKNLYDAILLSGILAVDDNTTKAPLSASMVKRYEEHQKDLKKLKDFIKVNAPDQYNAIFKDKNKKGYAGYIESGVEQDEFYKYLKGILLKINGSGDFLDKIDCEDFLRKQRTFDNGSIPHQIHLQEMHAILRRQGEHYPFLKENQDKIEKILTFRIPYYVGPLARKGSRFAWAEYKADEKITPWNFDDILDKEKSAEKFITRMTLNDLYLPEEKVLPKHSPLYETFTVYNELTKVKYVNEQGEAKFFDTNMKQEIFDHVFKENRKVTKDKLLNYLNKEFEEFRIVNLTGLDKENKAFNSSLGTYHDLRKILDKSFLDDKANEKTIEDIIQTLTLFEDREMIRQRLQKYSDIFTKAQLKKLERRHYTGWGRLSYKLINGIRNKENKKTILDYLIDDGYANRNFMQLINDDALSFKEEIARAQIIGDVDDIANVVHDLPGSPAIKKGILQSVKIVDELVKVMGHNPANIIIEMARENQTTDKGRRNSQQRLKLLQDSLKNLDNPVNIKNVENQQLQNDRLFLYYIQNGKDMYTGETLDINNLSQYDIDHIIPQAFIKDNSLDNRVLTRSDKNRGKSDDVPSIEVVHEMKSFWSKLLSVKLITQRKFDNLTKAERGGLTEEDKAGFIKRQLVETRQITKHVAQILDERFNTEFDGAQRRIRNVKIITLKSNLVSNFRKEFELYKVREINDYHHAHDAYLNAVVGNALLLKYPQLEPEFVYGEYPKYNSYRSRKSATEKFLFYSNILRFFKKEDIQTNEDGEIAWNKEKHIKILRKVLSYPQVNIVKKTEEQTGGFSKESILPKGESDKLIPRKTKNSYWNPKKYGGFDSPVVAYSILVFADVEKGKSKKLRKVQDMVGITIMEKKRFEKNPVDFLEQRGYRNVRLEKIIKLPKYSLFELENKRRRLLASARELQKGNELVIPQRFTTLLYHSYQIEKNYEPEHREYVEKHKDEFKELLEYISVFSRKYVLADNNLTKIEMLFSKNKDAEVSSLAKSFISLLTFTAFGAPAAFNFFGENIDRKRYTSVTECLNATLIHQSITGLYETRIDLSKLGED

SEQ ID NO: 97 - protein, 1377 aa, Streptococcus caballi
MTKKNYSIGLDIGTNSVGWAVITDDYKVPAKKMKVLGNTDKKYIKKNLLGALLFDSGETAEATRLKRTARRRYTRRKNRLRYLQDIFTEEMAKVDDSFFQRLDESFLTDNDKNFDSHPIFGNKAEEDAYHQKFPTIYHLRKHLADSTEKADLRLVYLALAHMIKFRGHFLIEGELNAENTDVQKLFTDFVGVYDRTFDDSHLSEITVDAASILTEKISKSRRLENLINNYPKEKKNTLFGNLIALALGLQPNFKTNFKLSEDAKLQFSKDTYEEDLEELLGKIGDDYADLFTSSKNLYDAILLSGILTVDDNSTKAPLSASMIKRYVEHHEDLEKLKEFIKANKSELYHDIFKDKTQNGYAGYIENGVKQDEFYKYLKGILTKINGSDYFLDKIEREDFLRKQRTFDNGSIPHQIHLQEMHAILRRQGDYYPFLKENQEEIEKILTFRIPYYVGPLARKDSRFAWAEYRSDEKITPWNFDKVIDKEKSAEKFITRMTLNDLYLPEEKVLPKHSHVYETFAVYNELTKVKYVNEQGKDSFFDSNMKQEIFDHVFKENRKVTKEKLLNYLDKEFPEYRIQDLVGLDKENKSFNASLGTYHDLKKILDKSFLDDKVNEEVIEDIIKTLTLFEDREMIQQRLQKYSDIFTKQQLKKLERRHYTGWGRLSYKLINGIRNKENNKTILDYLIDDGSANRNFMQLINDDALSFKQIIQEAQVVGDVDDIETVVHDLPGSPAIKKGILQSVKIVDELIKVMGDNPDNIVIEMARENQTTNRGRSQSQQRLKKLQNSLKELGSNILNEEKPSYIEDKVENSHLQNDQLFLYYIQNGKDMYTGDELDIDHLSDYDIDHIIPQAFIKDDSIDNRVLTSSAKNRGKSDDVPSLGIVRARKAEWVRLYKSGLISKRKFDNLTKAERGGLTEADKAGFIKRQLVETRQITKHVAQILDARFNTERDENDKVIRDVKVITLKSNLVSQFRKEFKFYKVREINDYHHAHDAYLNAVVGTALLKKYPKLAPEFVYGEYKKYDVRKLVAKSSDDHSEMGKATAKYFFYSNLMNFFKRVIRYSNGKVIVRPVVEYSKDTGEIAWNKRTDFEKVRKVLSYPQVNIVKKVETQTGGFSKESILPKGDSDKLIPRKTKKVLWEPKKYGGFDSPTVAYSVLVVADVEKGKTKKLKTVKELVGISIMERSFFEKNPVEFLKNKGYQNVQEDKLMKLPKYSLFEFEGGRRRLLASATELQKGNEIMLSAHLVALLYHAHRIGNFNSAEHLKYVSEHKKEFEEVLSCVENFANVYVDVEKNLSKIRAAADSMDNFSIEEISDSFINLLTLTALGAPADFNFLGEKIPRKRYNSTKECLNATLIHQSITGLYETRIDLSKLGEE

SEQ ID NO: 98 - protein, 1375 aa, Streptococcus canis
MEKKYSIGLDIGTNSVGWAVITDDYKVPSKKFKVLGNTNRKSIKKNLMGALLFDSGETAEATRLKRTARRRYTRRKNRIRYLQEIFANEMAKLDDSFFQRLEESFLVEEDKKNERHPIFGNLADEVAYHRNYPTIYHLRKKLADSPEKADLRLIYLALAHIIKFRGHFLIEGKLNAENSDVAKLFYQLIQTYNQLFEESPLDEIEVDAKGILSARLSKSKRLEKLIAVFPNEKKNGLFGNIIALALGLTPNFKSNFDLTEDAKLQLSKDTYDDDLDELLGQIGDQYADLFSAAKNLSDAILLSDILRSNSEVTKAPLSASMVKRYDEHHQDLALLKTLVRQQFPEKYAEIFKDDTKNGYAGYVGIGIKHRKRTTKLATQEEFYKFIKPILEKMDGAEELLAKLNRDDLLRKQRTFDNGSIPHQIHLKELHAILRRQEEFYPFLKENREKIEKILTFRIPYYVGPLARGNSRFAWLTRKSEEAITPWNFEEVVDKGASAQSFIERMTNFDEQLPNKKVLPKHSLLYEYFTVYNELTKVKYVTERMRKPEFLSGEQKKAIVDLLFKTNRKVTVKQLKEDYFKKIECFDSVEIIGVEDRFNASLGTYHDLLKIIKDKDFLDNEENEDILEDIVLTLTLFEDREMIEERLKTYAHLFDDKVMKQLKRRHYTGWGRLSRKMINGIRDKQSGKTILDFLKSDGFSNRNFMQLIHDDSLTFKEEIEKAQVSGQGDSLHEQIADLAGSPAIKKGILQTVKIVDELVKVMGHKPENIVIEMARENQTTTKGLQQSRERKKRIEEGIKELESQILKENPVENTQLQNEKLYLYYLQNGRDMYVDQELDINRLSDYDVDHIVPQSFIKDDSIDNKVLTRSVENRGKSDNVPSEEVVKKMKNYWRQLLNAKLITQRKFDNLTKAERGGLSEADKAGFIKRQLVETRQITKHVARILDSRMNTKRDKNDKPIREVKVITLKSKLVSDFRKDFQLYKVRDINNYHHAHDAYLNAVVGTALIKKYPKLESEFVYGDYKVYDVRKMIAKSEQEIGKATAKRFFYSNIMNFFKTEVKLANGEIRKRPLIETNGETGEVVWNKEKDFATVRKVLAMPQVNIVKKTEVQTGGFSKESILSKRESAKLIPRKKGWDTRKYGGFGSPTVAYSILVVAKVEKGKAKKLKSVKVLVGITIMEKGSYEKDPIGFLEAKGYKDIKKELIFKLPKYSLFELENGRRRMLASATELQKANELVLPQHLVRLLYYTQNISATTGSNNLGYIEQHREEFKEIFEKIIDFSEKYILKNKVNSNLKSSFDEQFAVSDSILLSNSFVSLLKYTSFGASGGFTFLDLDVKQGRLRYQTVTEVLDATLIYQSITGLYETRTDLSQLGGD

SEQ ID NO: 99 - protein, 1345 aa, Streptococcus constellatus
MGKPYSIGLDIGTNSVGWAVVTDDYKVPAKKMKVLGNTDKQSIKKNLLGALLFDSGETAEATRLKRTARRRYTRRKNRLRYLQEIFTGEMNKVDENFFQRLDDSFLVDEDKRGEHHPIFGNIAAEVKYHDDFPTIYHLRRHLADTSKKADLRLVYLALAHMIKFRGHFLYEGDLKAENTDVQALFKDFVEEYDKTIEESHLSEITVDALSILTEKVSKSSRLENLIAHYPTEKKNTLFGNLIALSLDLHPNFKTNFQLSEDAKLQFSKDTYEEDLEGFLGEVGDEYADLFASAKNLYDAILLSGILTVDDNSTKAPLSASMVKRYEEHQKDLKKLKDFIKVNAPDQYNAIFKDKNKKGYASYIESGVKQDEFYKYLKGILLKINGSGDFLDKIDREDFLRKQRTFDNGSIPHQIHLQEMHAILRRQGEHYPFLKENQDKIEKILTFRIPYYVGPLARKGSRFAWAEYKADEKITPWNFDDILDKEKSAEKFITRMTLNDLYLPEEKVLPKHSPLYEAFTVYNELTKVKYVNEQGEAKFFDTNMKQEIFDHVFKENRKVTKDKLLNYLNKEFEEFRIVNLTGLDKENKAFNSSLGTYHDLRKILDKSFLDDKANEKTIEDIIQTLTLFEDREMIRQRLQKYSDIFTKAQLKKLERRHYTGWGRLSYKLINGIRNKENKKTILDYLIDDGYANRNFMQLINDDALSFKEEIARAQIIDDVDDIANVVHDLPGSPAIKKGILQSVKIVDELVKVMGHNPANIIIEMARENQTTDKGRRNSQQRLKLLQDSLKNLDNPVNIKNVENQQLQNDRLFLYYIQNGKDMYTGETLDINNLSQYDIDHIIPQAFIKDNSLDNRVLTRSDKNRGKSDDVPSIEVVHEMKSFWSKLLSVKLITQRKFDNLTKAERGGLTEEDKAGFIKRQLVETRQITKHVAQILDERFNTEFDGNKRRIRNVKIITLKSNLVSNFRKEFELYKVREINDYHHAHDAYLNAVVGNALLLKYPQLEPEFVYGEYPKYNSYRSRKSATEKFLFYSNILRFFKKEDIQTNEDGEIAWNKEKHIKILRKVLSYPQVNIVKKTEEQTGGFSKESILPKGESDKLIPRKTKNSYWDPKKYGGFDSPVVAYSILVFADVEKGKSKKLRKVQDMVGITIMEKKRFEKNPVDFLEQRGYRNVRLEKIIKLPKYSLFELENKRRRLLASAKELQKGNELVIPQRFTTLLYHSYRIEKDYEPEHREYVEKHKDEFKELLEYISVFSRKYVLADNNLTKIEMLFSKNKDAEVSSLAKSFISLLTFTAFGAPAAFNFFGENIDRKRYTSVTECLNATLIHQSITGLYETRIDLSKLGED

SEQ ID NO: 100 - protein, 1365 aa, Streptococcus constellatus
MTQKYSIGLDIGTNSVGWAIVTDDYKVPAKKMKILGNTNKQYIKKNLLGALLFDSGETAKATRLKRTARRRYTRRKNRLRYLQEIFIEEMNKVDENFFQRLDDSFLVTEDKRGSKYPIFGTLKEEKEYYKEFETIYHLRKRLADSTGKVDLRLVYLALAHMIKFRGHFLIEGQLKAENTDVQTLFNDFVEVYDKTIEESHLAEITVDALSILTEKVSKSRRLENLVKCYPTEKKNTLFGNLIALSLGLQPNFKTNFQLSEDAKLQFSKDTYEEDLEELLGKIGDDYADLFTSAKNLYDTILLSGILAVDDNSTKALLSASMIKRYEEHQKDLKKLKDFIKVNAPAQYDDIFKDETKNGYAGYIENGVKQDEFYKYLKNTLSKIDGSGYFLDKIEREDFLRKQRTFDNGSIPHQIHLQEMHAILRRQGEHYPFLKENQDKIEKILTFRIPYYVGPLVRKGSRFAWAEYKADEKITPWNFDDILDKEKSAEKFITRMTLNDLYLPEEKVLPKHSLLYEIFTVYNELTKVKYVNEQGEAKFFDANMKQEIFDHVFKENPKVTKDKLLNYLDKEFDEFRIVDLTGLDKENKAFNASLGTYHDLRKILDKSFLDDKANEKTIEDIIQTLTLFEDREMIRQRLQKYSDIFTKAQLKKLERRHYTGWGRLSYKLINGIRNKENNKTILEYLVDDGYANRNFMQLINDDTLPFKQIIKDAQAIDDVDDIELIVHDLPGSPAIKKGILQSIKIVDELVKVMGYNPDNIVIEMARENQTTTKGRRNSQQRLKLLQDSLTNLDNPVSIKNVENQQLQNDRLFLYYIQNGKDMYTGEELDIHHLSDYDIDHIIPQAFIKDDSIDNRVLTSSAKNRGKSDNVPNLEVVCDRKADWIRLREAGLISQRKFDNLTKAERGGLTENDKAGFIHRQLVETRQITKHVAQILDARFNPKRDDNKKVIRDVKIITLKSNLVSQFRRDFKLYKVREINDYHHAHDAYLNAVVGTALLKKYPKLTSEFVYGEYKKYDVRKFIAKSDNDEIGKATAKYFFYSNLMNFFKTEVKFADGTVVERPDIETSEDGEIAWNKQTDFKIVRKVLSYPQVNIVKKVEKQTGRFSKESILPKGDSDKLIARKTKENYWDTKKYGGFDSPTVAYSVLVVADIKKGKAKKLKTVKELVGISIMERPFFEKNPIMFLESKGYRNIQKDKLIKLPKYSLFEFEGGRRRLLASAVELQKGNEMVLPQYLNNLLYHAHRIDNSDNSEHLKYITEHKEEFGKLLSYIENFAKSYVDVDKNLEKIQLAVEKIDSFSVKEISNSFIHLLTLTALGAPADFNFLGEKIPRKRYTSTKECLNATLIHQSITGLYETQTDLSKLGED

SEQ ID NO: 101 - protein, 1371 aa, Streptococcus dysgalactiae
MDKKYSIGLDIGTNSVGWAVITDDYKVPSKKFKVLGNTDRHSIKKNLIGALLFDSGETAEATRLKRTARRRYTRRKNRIRYLQEIFSSEMSKVDDSFFHRLEESFLVEEDKKHERHPIFGNIVDEVAYHEKYPTIYHLRKKLADSTDKADLRLIYLALAHMIKFRGHFLIEGDLNPDNSDMDKLFIQLVQTYNQLFEENPINASRVDAKAILSARLSKSRRLENLIAQLPGEKRNGLFGNLIALSLGLTPNFKSNFDLAEDAKLQLSKDTYDDDLDNLLAQIGDQYADLFLAAKNLSDAILLSDILRVNSEITKAPLSASMIKRYDEHHQDLTLLKALVRQQLPEKYKEIFFDQSKNGYAGYIDGGASQEEFYKFIKPILEKMDGTEELLAKLNREDLLRKQRTFDNGSIPHQIHLGELHAILRRQEDFYPFLKDNREKIEKILTFRIPYYVGPLARGNSRFAWMTRKSEETITPWNFEEVVDKGASAQSFIERMTNFDKNLPNEKVLPKHSLLYEYFTVYNELTKVKYVTEGMRKPEFLSGKQKEAIVDLLFKTNRKVTVKQLKEDYFKKIECFDSVEISGVEDRFNASLGTYHDLLKIIKDKDFLDNEENEDILEDIVLTLTLFEDKEMIEERLKKYANLFDDKVMKQLKRRHYTGWGRLSRKLINGIRDKQSGKTILDFLKSDGFANRNFMQLINDDSLTFKEAIQKAQVSGQGHSLHEQIANLAGSPAIKKGILQSVKVVDELVKVMGHKPENIVIEMARENQTTQKGQKNSRERMKRIEEGIKELGSQILKEHPVENTQLQNEKLYLYYLQNGRDMYVDQELDINRLSDYDVDHIVPQSFIKDDSIDNKILTRSDKNRGKSDNVPSEEVVKKMKNYWRQLLNAKLITQRKFDNLTKAERGGLSELDKAGFIKRQLVETRQITKHVAQILDSRMNTKYDENDKLIREVKVITLKSKLVSDFRKDFQFYKVREINNYHHAHDAYLNAVVGTALIKKYTKLESEFVYGDYKVYDVRKMIAKSEQEIGKATAKRFFYSNIMNFFKTEITLANGEIRKRPLIETNEETGEIVWDKGRDFATVRKVLSMPQVNIVKKTEVQTGALTNESIYARGSFDKLISRKHRFESSKYGGFGSPTVTYSVLVVAKSKVQDGKVKKIKTGKELIGMTLLDKLVFEKNPLKFIEDKGYGNVQIDKCIKLPKYSLFEFENGTRRMLASVMANNNSRGDLQKANEMFLPAKLVTLLYHAHKIESSKELEHEAYILDHYNDLYQLLSYIERFASLYVDVEKNISKVKELFSNIESYSISEICSSVINLLTLTASGAPADFKFLGTTIPRKRYGSPQSILSSTLIHQSITGLYETRIDLSQLGGD

SEQ ID NO: 102 - protein, 1371 aa, Streptococcus dysgalactiae
MDKKYSIGLDIGTNSVGWAVITDDYKVPSKKFKVLGNTDRHSIKKNLIGALLFDSGETAEATRLKRTARRRYTRRKNRIRYLQEIFSSEMSKVDDSFFHRLEESFLVEEDKKHERHPIFGNIVDEVAYHEKYPTIYHLRKKLADSTDKADLRLIYLALAHMIKFRGHFLIEGDLNPDNSDVDKLFIQLVQTYNQLFEEKPINASGVDAKAILSARLSKSKRLENLIAQLPGEKKNGLFGNLIALSLGLTPNFKSNFDLAEDAKLQLSKDTYDDDLDNLLAQIGNQYADLFLAAKNLSDAILLSDILRVNSEITKAPLSASMIKRYDEHHQDLTLLKALVRQQLPEKYKEIFFDQSKNGYAGYIDGGASQEEFYKFIKPILEKMDGTEELLAKLNREDLLRKQRTFDNGSIPHQIHLGELHAILRRQEDFYPFLKDNREKIEKILTFRIPYYVGPLARGNSRFAWMTRKSEETITPWNFEEVVDKGASAQSFIERMTNFDKNLPNEKVLPKHSLLYEYFTVYNELTKVKYVTEGMRKPEFLSGKQKEAIVDLLFKTNRKVTVKQLKEDYFKKIECFDSVEISGVEDRFNASLGTYHDLLKIIKDKDFLDNEENEDILEDIVLTLTLFEDKEMIEERLKKYANLFDDKVMKQLKRRHYTGWGRLSRKLINGIRDKQSGKTILDFLKSDGFANRNFMQLINDDSLTFKEAIQKAQVSGQGHSLHEQIANLAGSPAIKKGILQSVKVVDELVKVMGHKPENIVIEMARENQTTQKGQKNSRERMKRIEEGIKELGSQILKEHPVENTQLQNEKLYLYYLQNGRDMYVDQELDINRLSDYDVDHIVPQSFIKDDSIDNKVLTRSDKNRGKSDNVPSEEVVKKMKNYWRQLLNAKLITQRKFDNLTKAERGGLSELDKAGFIKRQLVETRQITKHVAQILDSRMNTKYDENDKLIREVKVITLKSKLVSDFRKDFQFYKVREINNYHHAHDAYLNAVVGTALIKKYPKLESEFVYGDYKVYDVRKMIAKSEQEIGKATAKRFFYSNIMNFFKTEITLANGEIRKRPLIETNEETGEIVWDKGRDFATVRKVLSMPQVNIVKKTEVQTGALTNESIYARGSFDKLISRKHRFESSKYGGFGSPTVTYSVLVVAKSKVQDGKVKKIKTGKELIGITLLDKLVFEKNPLKFIEDKGYGNVQIDKCIKLPKYSLFEFENGTRRMLASVMANNNSRGDLQKANEMFLPAKLVTLLYHAHKIESSKELEHEAYILDHYNDLYQLLSYIERFASLYVDVEKNISKVKELFSNIESYSISEICSSVINLLTLTASGAPADFKFLGTTIPRKRYGSPQSILSSTLIHQSITGLYETRIDLSQLGGD

SEQ ID NO: 103 - protein, 1371 aa, Streptococcus dysgalactiae
MDKKYSIGLDIGTNSVGWAVITDDYKVPSKKFKVLGNTDRHSIKKNLIGALLFDSGETAEATRLKRTARRRYTRRKNRIRYLQEIFSSEMSKVDDSFFHRLEESFLVEEDKKHERHPIFGNIVDEVAYHEKYPTIYHLRKKLADSTDKADLRLIYLALAHMIKFRGHFLIEGDLNPDNSDMDKLFIQLVQTYNQLFEENPINASRVDAKAILSARLSKSRRLENLIAQLPGEKRNGLFGNLIALSLGLTPNFKSNFDLAEDAKLQLSKDTYDDDLDNLLAQIGDQYADLFLAAKNLSDAILLSDILRVNSEITKAPLSASMIKRYDEHHQDLTLLKALVRQQLPEKYKEIFFDQSKNGYAGYIDGGASQEEFYKFIKPILEKMDGTEELLAKLNREDLLRKQRTFDNGSIPHQIHLGELHAILRRQEDFYPFLKDNREKIEKILTFRIPYYVGPLARGNSRFAWMTRKSEETITPWNFEEVVDKGASAQSFIERMTNFDKNLPNEKVLPKHSLLYEYFTVYNELTKVKYVTEGMRKPEFLSGKQKEAIVDLLFKTNRKVTVKQLKEDYFKKIECFDSVEISGVEDRFNASLGTYHDLLKIIKDKDFLDNEENEDILEDIVLTLTLFEDKEMIEERLKTYAHLFDDKVMKQLKRRHYTGWGRLSRKLINGIRDKQSGKTILDFLKSDGFANRNFIQLIHDDSLTFKEAIQKAQVSGQGHSLHEQIANLAGSPAIKKGILQSVKVVDELVKVMGHKPENIVIEMARENQTTQKGQKNSRERMKRIEEGIKELGSQILKEHPVENTQLQNEKLYLYYLQNGRDMYVDQELDINRLSDYDVDHIVPQSFIKDDSIDNKVLTRSDKNRGKSDDVPSEEVVKKMKNYWRQLLNAKLITQRKFDNLTKAERGGLSELDKAGFIKRQLVETRQITKHVAQILDSRMNTKYDENDKLIREVKVITLKSKLVSDFRKDFQFYKVREINNYHHAHDAYLNAVVGTALIKKYPKLESEFVYGDYKVYDVRKMIAKSEQEIGKATAKRFFYSNIMNFFKTEITLANGEIRKRPLIETNEETGEIVWNKGRDFATVRKVLSMPQVNIVKKTEVQTGALTNESIYARGSFDKLISRKHRFESSKYGGFGSPTVTYSVLVVAKSKVQDGKVKKIKTGKELIGITLLDKLVFEKNPLKFIEDKGYGNVQIDKCIKLPKYSLFEFENGTRRMLASVMANNNSRGDLQKANEMFLPAKLVTLLYHAHKIESSKELEHEAYILDHYNDLYQLLSYIERFASLYVDVEKNISKVKELFSNIESYSISEICSSVINLLTLTASGAPADFKFLGTTIPRKRYGSPQSILSSTLIHQSITGLYETRIDLSQLGGD

SEQ ID NO: 104 - protein, 1371 aa, Streptococcus dysgalactiae
MDKKYSIGLDIGTNSVGWAVITDDYKVPSKKFKVLGNTDRHSIKKNLIGALLFDSGETAEATRLKRTARRRYTRRKNRIRYLQEIFSSEMSKVDDSFFHRLEESFLVEEDKKHERHPIFGNIVDEVAYHEKYPTIYHLRKKLADSTDKADLRLIYLALAHMIKFRGHFLIEGDLNPDNSDMDKLFIQLVQTYNQLFEENPINASRVDAKAILSARLSKSRRLENLIAQLPGEKRNGLFGNLIALSLGLTPNFKSNFDLAEDAKLQLSKDTYDDDLDNLLAQIGDQYADLFLAAKNLSDAILLSDILRVNSEITKAPLSASMIKRYDEHHQDLTLLKALVRQQLPEKYKEIFFDQSKNGYAGYIDGGASQEEFYKFIKPILEKMDGTEELLAKLNREDLLRKQRTFDNGSIPHQIHLGELHAILRRQEDFYPFLKDNREKIEKILTFRIPYYVGPLARGNSRFAWMTRKSEETITPWNFEEVVDKGASAQSFIERMTNFDKNLPNEKVLPKHSLLYEYFTVYNELTKVKYVTEGMRKPEFLSGKQKEAIVDLLFKTNRKVTVKQLKEDYFKKIECFDSVEISGVEDRFNASLGTYHDLLKIIKDKDFLDNEENEDILEDIVLTLTLFEDKEMIEERLKKYANLFDDKVMKQLKRRHYTGWGRLSRKLINGIRDKQSGKTILDFLKSDGFANRNFMQLINDDSLTFKEAIQKAQVSGQGHSLHEQIANLAGSPAIKKGILQSVKVVDELVKVMGHKPENIVIEMARENQTTQKGQKNSRERMKRIEEGIKELGSQILKEHPVENTQLQNEKLYLYYLQNGRDMYVDQELDINRLSDYDVDHIVPQSFIKDDSIDNKVLTRSDKNRGKSDNVPSEEVVKKMKNYWRQLLNAKLITQRKFDNLTKAERGGLSELDKAGFIKRQLVETRQITKHVAQILDSRMNTKYDENDKLIREVKVITLKSKLVSDFRKDFQFYKVREINNYHHAHDAYLNAVVGTALIKKYPKLESEFVYGDYKVYDVRKMIAKSEQEIGKATAKRFFYSNIMNFFKTEITLANGEIRKRPLIETNEETGEIVWDKGRDFATVRKVLSMPQVNIVKKTEVQTGALTNESIYARGSFDKLISRKHRFESSKYGGFGSPTVTYSVLVVAKSKVQDGKVKKIKTGKELIGITLLDKLVFEKNPLKFIEDKGYGNVQIDKCIKLPKYSLFEFENGTRRMLASVMANNNSRGDLQKANEMFLPAKLVTLLYHAHKIESSKELEHEAYILDHYNDLYQLLSYIERFASLYVDVEKNISKVKELFSNIESYSISEICSSVINLLTLTASGAPADFKFLGTTIPRKRYGSPQSILSSTLIHQSITGLYETRIDLSQLGGD

SEQ ID NO: 105 - protein, 1371 aa, Streptococcus dysgalactiae
MDKKYSIGLDIGTNSVGWAVITDDYKVPSKKFKVLGNTDRHSIKKNLIGALLFDSGETAEATRLKRTARRRYTRRKNRIRYLQEIFSSEMSKVDDSFFHRLEESFLVEEDKKHERHPIFGNIVDEVAYHEKYPTIYHLRKKLADSTDKADLRLIYLALAHMIKFRGHFLIEGDLNPDNSDMDKLFIQLVQTYNQLFEENPINASRVDAKAILSARLSKSRRLENLIAQLPGEKRNGLFGNLIALSLGLTPNFKSNFDLAEDAKLQLSKDTYDDDLDNLLAQIGDQYADLFLAAKNLSDAILLSDILRVNSEITKAPLSASMIKRYDEHHQDLTLLKALVRQQLPEKYKEIFFDQSKNGYAGYIDGGASQEEFYKFIKPILEKMDGTEELLAKLNREDLLRKQRTFDNGSIPHQIHLGELHAILRRQEDFYPFLKDNREKIEKILTFRIPYYVGPLARGNSRFAWMTRKSEETITPWNFEEVVDKGASAQSFIERMTNFDKNLPNEKVLPKHSLLYEYFTVYNELTKVKYVTEGMRKPEFLSGKQKEAIVDLLFKTNRKVTVKQLKEDYFKKIECFDSVEISGVEDRFNASLGTYHDLLKIIKDKDFLDNEENEDILEDIVLTLTLFEDKEMIEERLKTYAHLFDDKVMKQLKRRHYTGWGRLSRKLINGIRDKQSGKTILDFLKSDGFANRNFIQLIHDDSLTFKEAIQKAQVSGQGHSLHEQIANLAGSPAIKKGILQSVKVVDELVKVMGHKPENIVIEMARENQTTQKGQKNSRERMKRIEEGIKELGSQILKEHPVENTQLQNEKLYLYYLQNGRDMYVDQELDINRLSDYDVDHIVPQSFIKDDSIDNKVLTRSDKNRGKSDDVPSEEVVKKMKNYWRQLLNAKLITQRKFDNLTKAERGGLSELDKAGFIKRQLVETRQITKHVAQILDSRMNTKYDENDKLIREVKVITLKSKLVSDFRKDFQFYKVREINNYHHAHDAYLNAVVGTALIKKYPKLESEFVYGDYKVYDVRKMIAKSEQEIGKATAKRFFYSNIMNFFKTEITLANGEIRKRPLIETNEETGEIVWDKGRDFATVRKVLSMPQVNIVKKTEVQTGALTNESIYARGSFDKLISRKHRFESSKYGGFGSPTVTYSVLVVAKCKVQDGKVKKIKTGKELIGITLLDKLVFEKNPLKFIEDKGYGNVQIDKCIKLPKYSLFEFENGTRRMLASVMANNNSRGDLQKANEMFLPAKLVTLLYHAHKIESSKELEHEAYILDHYNDLYQLLSYIERFASLYVDVEKNISKVKELFSNIESYSISEICSSVINLLTLTASGAPADFKFLGTTIPRKRYGSPQSILSSTLIHQSITGLYETRIDLSQLGGD

SEQ ID NO: 106 - protein, 1371 aa, Streptococcus dysgalactiae
MDKKYSIGLDIGTNSVGWAVITDDYKVPSKKFKVLGNTDRHSIKKNLIGALLFDSGETAEATRLKRTARRRYTRRKNRIRYLQEIFSSEMSKVDDSFFHRLEESFLVEEDKKHERHPIFGNIVDEVAYHEKYPTIYHLRKKLADSTDKADLRLIYLALAHMIKFRGHFLIEGDLNPDNSDVDKLFIQLVQTYNQLFEENPINASRVDAKAILSARLSKSRRLENLIAQLPGEKRNGLFGNLIALSLGLTPNFKSNFDLAEDAKLQLSKDTYDDDLDNLLAQIGDQYADLFLAAKNLSDAILLSDILRVNSEITKAPLSASMIKRYDEHHQDLTLLKALVRQQLPEKYKEIFFDQSKNGYAGYIDGGASQEEFYKFIKPILEKMDGTEELLAKLNREDLLRKQRTFDNGSIPHQIHLGELHAILRRQEDFYPFLKDNREKIEKILTFRIPYYVGPLARGNSRFAWMTRKSEETITPWNFEEVVDKGASAQSFIERMTNFDKNLPNEKVLPKHSLLYEYFTVYNELTKVKYVTEGMRKPAFLSGEQKKAIVDLLFKTNRKVTVKQLKEDYFKKIECFDSVEISGVEDRFNASLGTYHDLLKIIKDKDFLDNEENEDILEDIVLTLTLFEDKEMIEERLKTYAHLFDDKVMKQLKRRHYTGWGRLSRKLINGIRDKQSGKTILDFLKSDGFANRNFIQLIHDDSLTFKEAIQKAQVSGQGHSLHEQIANLAGSPAIKKGILQSVKVVDELVKVMGHKPENIVIEMARENQTTQKGQKNSRERMKRIEEGIKELGSQILKEHPVENTQLQNEKLYLYYLQNGRDMYVDQELDINRLSDYDVDHIVPQSFIKDDSIDNKVLTRSDKNRGKSDNVPSEEVVKKMKNYWRQLLNAKLITQRKFDNLTKAERGGLSELDKAGFIKRQLVETRQITKHVAQILDSRMNTKYDENDKLIREVKVITLKSKLVSDFRKDFQFYKVREINNYHHAHDAYLNAVVGTALIKKYPKLESEFVYGDYKVYDVRKMIAKSEQEIGKATAKRFFYSNIMNFFKTEITLANGEIRKRPLIETNEETGEIVWDKGRDFATVRKVLSMPQVNIVKKTEVQTGALTNESIYARGSFDKLISRKHRFESSKYGGFGSPTVTYSVLVVAKSKVQDGKVKKIKTGKELIGITLLDKLVFEKNPLKFIEDKGYGNVQIDKCIKLPKYSLFEFENGTRRMLASVMANNNSRGDLQKANEMFLPAKLVTLLYHAHKIESSKELEHEAYILDHYNDLYQLLSYIERFASLYVDVEKNISKVKELFSNIESYSISEICSSVINLLTLTASGAPADFKFLGTTIPRKRYGSPQSILSSTLIHQSITGLYETRIDLSQLGGD

SEQ ID NO: 107 - protein, 1348 aa, Streptococcus equi
MKKPYTIALDIGTNSVGWVVVTDDYRVPTKKMKVLGNTERKTIKKNLIGALLFDSGDTAEGTRLKRTARRRYTRRKNRLRYLKEIFTEEMAKVDDGFFQRLEDSFYVLEDKEGNKHPIFANLADEVAYHKKYPTIYHLRKELVDNPQKADLRLIYLAVAHIIKFRGHFLIEGTLSSKNNNLQKSFDHLVDTYNLLFEEQRLLTEGINAKELLSAALSKSKRLENLISLIPGQKKTGIFGNIIALSLGLTPNFKANFGLSKDVKLQLAKDTYADDLDSLLAQIGDQYADLFLAAKNLSDAILLSDILTESDEITRAPLSASMVKRYREHHKDLVTLKTLIKDQLPEKYQEIFLDKTKNGYAGYIEGQVSQEEFYKYLKPILARLDGSEPLLLKIDREDFLRKQRTFDNGSIPHQIHLEELHAILRRQEVFYPFLKDNRKKIESLLTFRIPYYVGPLARGHSRFAWVKRKFDGAIRPWNFEEIVDEEASAQIFIEKMTKNDLYLPNEKVLPKHSLLYETFTVYNELTKVKYATEGMTRPQFLSADQKQAIVDLLFKTNRKVTVKQLKENYFKKIECWDSVEITGVEDSFNASLGTYHDLLKIIQDKDFLDNPDNQKIIEDIILTLTLFEDKKMISKRLDQYAHLFDKVVLNKLERHHYTGWGRLSGKLINGIRDKQSGKTILDFLKADGFANRNFMQLIHDSELSFIDEIAKAQVIGKTEYSKDLVGNLAGSPAIKKGISQTIKIVDELVKIMGYLPQQIVIEMARENQTTAQGIKNARQRMRKLEETAKKLGSNILKEHPVDNSQLQNDKRYLYYLQNGKDMYTGDDLDIDYLSSYDIDHIIPQSFIKNNSIDNKVLTSQGANRGKLDNVPSEAIVRKMKGYWQSLLRAGAISKQKFDNLTKAERGGLTQVDKAGFIQRQLVETRQITKHVAQILDSRFNTEFDDHNKRIRKVHIITLKSKLVSDFRKEFGLYKIRDINHYHHAHDAYLNAVVAKAILGKYPQLAPEFVYGDYPKYNSFKERQKATQKMLFYSNILKFFKDQESLHVNSDGEEIWNANKHLPIIKNVLSIPQVNIVKKTEVQTGGFYKESILSKGNSDKLIPRKNNWDTRKYGGFDSPTVAYSVLVIAKMEKGKAKVLKPVKEMVGITIMERTAFEENPVVFLEARGYREIQEHLIIKLPKYSLFELENGRRRLLASASELQKGNELFLPVDYMTFLYLAAHYHELTGSSEDVLRKKYFVDRHLHYFDDIIQMINDFAERHILASSNLEKINHTYHNNSDLPVNERAENIINVFTFVALGAPAAFKFFDATIDRKRYTSTKEVLNATLIHQSVTGLYETRIDLSQLGEN

SEQ ID NO: 108 - protein, 1348 aa, Streptococcus equi
MKKPYTIALDIGTNSVGWVVVTDDYRVPTKKMKVLGNTERKTIKKNLIGALLFDSGDTAEGTRLKRTARRRYTRRKNRLRYLKEIFTEEMAKVDDGFFQRLEDSFYVLEDKEGNKHPIFANLADEVAYHKKYPTIYHLRKELVDNPQKADLRLIYLAVAHIIKFRGHFLIEGTLSSKNNNLQKSFDHLVDTYNLLFEEQRLLTEGINAKELLSAALSKSKRLENLISLIPGQKKTGIFGNIIALSLGLTPNFKANFGLSKDVKLQLAKDTYADDLDSLLAQIGDQYADLFLAAKNLSDAILLSDILTESDEITRAPLSASMVKRYREHHKDLVTLKTLIKDQLPEKYQEIFLDKTKNGYAGYIEGQVSQEEFYKYLKPILARLDGSEPLLLKIDREDFLRKQRTFDNGSIPHQIHLEELHAILRRQEVFYPFLKDNRKKIESLLTFRIPYYVGPLARGHSRFAWVKRKFDGAIRPWNFEEIVDEEASAQIFIEKMTKNDLYLPNEKVLPKHSLLYETFTVYNELTKVKYATEGMTRPQFLSADQKQAIVDLLFKTNRKVTVKQLKENYFKKIECWDSVEITGVEDSFNASLGTYHDLLKIIQDKDFLDNPDNQKIIEDIILTLTLFEDKKMISKRLDQYAHLFDKVVLNKLERHHYTGWGRLSGKLINGIRDKQSGKTILDFLKADGFANRNFMQLIHDSELSFIDEIAKAQVIGKTEYSKDLVGNLASSPAIKKGISQTIKIVDELVKIMGYLPQQIVIEMARENQTTAQGIKNARQRMRKLEETAKKLGSNILKEHPVDNSQLQNDKRYLYYLQNGKDMYTGDDLDIDYLSSYDIDHIIPQSFIKNNSIDNKVLTSQGANRGKLDNVPSEAIVRKMKGYWQSLLRAGAISKQKFDNLTKAERGGLTQVDKAGFIQRQLVETRQITKHVAQILDSRFNTEFDDHNKRIRKVHIITLKSKLVSDFRKEFGLYKIRDINHYHHAHDAYLNAVVAKAILGKYPQLAPEFVYGDYPKYNSFKERQKATQKTLFYSNILKFFKDQESLHVNSDGEEIWNANKHLPIIKNVLSIPQVNIVKKTEVQTGGFYKESILSKGNSDKLIPRKNNWDTRKYGGFDSPTVAYSVLVIAKMEKGKAKVLKPVKEMVGITIMERIAFEENPVVFLEAKGYREIQEHLIIKLPKYSLFELENGRRRLLASASELQKGNELFLPVDYMTFLYLAAHYHELTGSSEDVLRKKYFVERHLHYFDDIIQMINDFAERHILASSNLEKINHTYHNNSDLPINERAENIINVFTFVALGAPAAFKFFDATIDRKRYTSTKEVLNATLIHQSVTGLYETRIDLSQLGEN

SEQ ID NO: 109 - protein, 1348 aa, Streptococcus equi
MKKPYTIALDIGTNSVGWVVVTDDYRVPTKKMKVLGNTERKTIKKNLIGALLFDSGDTAEGTRLKRTARPRYTRRKNRLRFLKEIFTEEMAKVDDGFFQRLEDSFYVLEDKEGNKHPIFANLADEVAYHKKYPTIYHLRKELVDNPQKADLRLIYLAVAHIIKFRGHFLIEGTLSSKNNNLQKSFDHLVDTYNLLFEEQRLLTEGINAKELLSAALSKSKRLENLISLIPGQKKTGIFGNIIALSLGLTPNFKANFGLSKDVKLQLAKDTYADDLDSLLAQIGDQYADLFLAAKNLSDAILLSDILTESDEITRAPLSASMVKRYREHHKDLVTLKTLIKDQLPEKYQEIFLDKTKNGYAGYIEGQVSQEEFYKYLKPILARLDGSEPLLLKIDREDFLRKQRTFDNGSIPHQIHLEELHAILRRQEVFYPFLKDNRKKIESLLTFRIPYYVGPLARGHSRFAWVKRKFDGAIRPWNFEEIVDEEASAQIFIEKMTKNDLYLPNEKVLPKHSLLYETFTVYNELTKVKYATEGMTRPQFLSADQKQAIVDLLFKTNRKVTVKQLKENYFKKIECWDSVEITGVEDSFNASLGTYHDLLKIIQDKDFLDNPDNQKIIEDIILTLTLFEDKKMISKRLDQYAHLFDKVVLNKLERHHYTGWGRLSGKLINGIRDKQSGKTILDFLKADGFANRNFMQLIHDSELSFIDEIAKAQVIGKTEYSKDLVGNLAGSPAIKKGISQTIKIVDELVKIMGYLPQQIVIEMARENQTTAQGIKNARQRMRKLEETAKKLGSNILKEHPVDNSQLQNDKRYLYYLQNGKDMYTGDDLDIDYLSSYDIDHIIPQSFIKNNSIDNKVLTSQGANRGKLDNVPSEAIVRKMKGYWQSLLRAGAISKQKFDNLTKAERGGLTQVDKAGFIQLQLVETRQITKHVAQILDSRFNTEFDDHNKRIRKVHIITLKSKLVSDFRKEFGLYKIRDINHYHHAHDAYLNAVVAKAILGKYPQLAPEFVYGDYPKYNSFKERQKATQKTLFYSNILKFFKDQESLHVNSDGEEIWNANKHLPIIKNVLSIPQVNIVKKTEVQTGGFYKESILSKGNSDKLIPRKNNWDTRKYGGFDSPTVAYSVLVIAKMEKGKAKVLKPVKEMVGITIMERIAFEENPVVFLEAKGYREIQEHLIIKLPKYSLFELENGRRRLLASASELQKGNELFLPVDYMTFLYLAAHYHELTGSSEDVLRKKYFVERHLHYFDDIIQMINDFAERHILASSNLEKINHTYHNNSDLPVNERAENIINVFTFVALGAPAAFKFFDATIDRKRYTSTKEVLNATLIHQSVTGLYETRIDLSQLGEN

SEQ ID NO: 110 - protein, 1377 aa, Streptococcus equinus
MEKTYSIGLDIGTNSVGWAVITDDYKVPAKKMKVLGNTDKKYIKKNLLGALLFDSGETAEATRLKRAARRRYTRRKNRLRYLQEIFAKEMAKVDESFFQRLEESFLTDDDKTFDSHPIFGNKAEEDTYHQEFPTIYHLRKHLADSPEKVDLRLVYLALAHMIKFRGHFLIEGQLNAENTDVQKIFADFVGVYDRTFDDSHLSEITVDAASILTEKISKSRRLENLIKQYPTEKKNTLFGNLVALALGLQPNFKTNFKLSEDAKLQFSKDTYDEDLEELLGKIGDDYADLFTAAKNLYDAILLSGILTVDDNSTKAPLSASMIKRYEEHHEDLEKLKTFIKVNNFDKYHEIFKDKSKNGYAGYIENGVKQDIFYKHLKSIISEKNGGQYFLDKIEREDFLRKQRTFDNGSIPYQIHLQEMRTILRRQGEYYPFLKENQAKIEKILTFRIPYYVGPLARKNSRFAWAKYHSDEPITPWNFDEVVDKEKSAEKFITRMTLNDLYLPEEKVLPKHSYVYETFAVYNELTKIKYVNEQGKSFFFDANMKQEIFDHVFKENRKVTKAKLLSYLNNEFEEFRINDLIGLDKDSKSFNASLGTYHDLKKILDKSFLDDKTNEQIIEDIVLTLTLFEDRDMIHERLQKYSDIFTSQQLKKLERRHYTGWGRLSYKLINGIRNKENNKTILDFLIDDGDANRNFMQLINDDSLSFKTTIQEAQVVGDVDDIEAVVHDLPGSPAIKKGILQSVKIVDELVKVMGHNPQNIVIEMARENQITGYGRNRSNQRLKRLQDSLKEFGSDILSKKKPSYVDSKVENSHLQNDRLFLYYIQNGKDMYTGEELDIDHLSDYDIDHIIPQAFIKDNSIDNRVLTSSAKNRGKSDDVPSIEIVRNRKSYWYKLYKSGLISKRKFDNLTKAERGGLTETDKAGFIKRQLVETRQITKHVAQILDARFNTKCDENDKVIRDVKVITLKSSLVSQFRKEFKFYKVREINDYHHAHDAYLNAVVGTALLKKYPKLAPEFVYGEYKKYDVRKLVAKSSDNHSELGKATAKYFFYSNLMNFFKTEVKYADGRVFERPDIETNADGEVVWNKQRDFNIVRKVLSYPQVNIVKKVEVQTGGFSKESILPKGDSDKLIPRKTKKLQWETQKYGGFDSPTVAYSVLVVADVEKGKTRKLKTVKELVGISIMERSSFEENPVSFLEKKGYHNVQEDKLIKLPKYSLFEFEGGRRRLLASATELQKGNEVVLPQYMVNLLYHSQHVNNSHKPEHLNYVKQHKDEFKDIFNLIISIARINILKPKVVDNLINEFTEYGQEDISSLSESFINLLKFISFGAPGAFKFLKLDVKQSNLRYKSTTEALSATLIHQSVTGLYETRIDLSKLGEE

SEQ ID NO: 111 - protein, 1370 aa, Streptococcus gallolyticus
MTKKNYSIGLDIGTNSVGWAVITDDYKVPAKKMKVLGNTDKKYIKKNLLGALLFDSGETAEATRLKRTARRRYTRRKNRLRYLQEIFAEEMTKVDESFFYRLDESFLTTDEKDFERHPIFGNKAEEDAYHQKFPTIYHLRNYLADSSEKADLRLVYLALAHMIKYRGHFLIEGKLNAENTDVQKLFTDFVGVYDRTFDDSHLSEITVDVASTLTEKISKSRRLENLIKYYPTEKKNTLFGNLIALALGLQPNFKMNFKLSEDAKLQFSKDTYEEDLEELLGKIGDDYADLFTSAKNLYDAILLSGILTVDDNSTKAPLSASMIKRYVEHHEDLEKLKEFIKANKSELYHDIFKDKNKNGYAGYIENGVKQDEFYKYLKNTLSKIDGSDYFLDKIEREDFLRKQRTFDNGSIPHQIHLQEMHAILRRQGDYYPFLKEKQDRIEKILTFRIPYYVGPLVRKDSRFAWAEYRSDEKITPWNFDKVIDKEKSAEKFITRMTLNDLYLPEEKVLPKHSHVYETYAVYNELTKIKYVNEQGKESFFDSNMKQEIFDHVFKENRKVTKEKLLNYLNKEFPEYRIKDLIGLDKENKSFNASLGTYHDLKKILDKAFLDDKVNEEVIEDIIKTLTLFEDKDMIHERLQKYSDIFTANQLKKLERRHYTGWGRLSYKLINGIRNKENNKTILDYLIDDGSANRNFMQLINDDTLPFKQIIQKSQVVGDVDDIEAVVHDLPGSPAIKKGILQSVKIVDELVKVMGDNPDNIVIEMARENQTTNRGRSQSQQRLKKLQSSLKELGSNILNEEKPSYIEDKVENSHLQNDQLFLYYIQNGKDMYTGDELDIDHLSDYDIDHIIPQAFIKDDSIDNRVLTSSAKNRGKSDDVPSLDIVRARKAEWVRLYKSGLISKRKFDNLTKAERGGLTEADKAGFIKRQLVETRQITKHVAQILDARFNTEHDENDKVIRDVKVITLKSNLVSQFRKDFEFYKVREINDYHHAHDAYLNAVVGTALLKKYPKLASEFVYGEYKKYDIRKFITNSSDKATAKYFFYSNLMNFFKTKVKYADGTVFERPIIETNADGEIAWNKQIDFEKVRKVLSYPQVNIVKKVETQTGGFSKESILPKGDSDKLIPRKTKKVYWDTKKYGGFDSPTVAYSVFVVADVEKGKAKKLKTVKELVGISIMERSFFEENPVEFLENKGYHNIREDKLIKLPKYSLFEFEGGRRRLLASASELQKGNEMVLPGYLVELLYHAHRADNFNSTEYLNYVSEHKKEFEKVLSCVEDFANLYVDVEKNLSKIRAVADSMDNFSIEEISNSFINLLTLTALGAPADFNFLGEKIPRKRYTSTKECLTATLIHQSITGLYETRIDLSKLGEE

SEQ ID NO: 112 - protein, 1371 aa, Streptococcus gallolyticus
MTEKNYSIGLDIGTNSVGWAVITDDYKVPAKKMKVLGNTDKKYIKKNLLGALLFDNGETAEATRLKRTARRRYTRRKNRLRYLQEIFAEEMAKVDESFFYRLDESFLTTDDKDFERHPIFGNKADEIKYHQEFPTIYHLRKHLADSHEKADLRLIYLALAHMIKFRGHFLIEGELNAENTDVQKLFEAFVEVYDRTFDDSNLSEITVDASSILTEKFSKSRRLENLIKHYPTEKKNTLFGNLVALALGLQPNFKTSFKLSEDAKLQFSKDTYEEDLEELIGKIGDEYADLFTSAKNLYDAILLSGILTVADNTTKAPLSASMIKRYNEHQVDLKKLKEFIKNNASDKYDEIFNDKDKNGYAGYIENGVKQDEFYKYLKTTLSKIDGSDYFLDKIEREDFLRKQRTFDNGSIPHQIHLQEMHAILRRQGEHYAFLKENQAKIEKILTFRIPYYVGPLARKNSRFAWAEYHSDEKITPWNFDEIIDKEKSAEKFITRMTLNDLYLPEEKVLPKHSLVYETYTVYNELTKVKYVNEQGKSNFFDANMKQEIFEHVFKENRKVTKDKFLNYLNKEFPEYRIQDLIGLDKENKSFNASLGTYHDLKKILDKSFLDDKTNETIIEDIIQTLTLFEDRDMIRQRLQKYSDIFTPQQLKKLERRHYTGWGRLSYKLINGIRNKENGKSILDYLIDDGYANRNFMQLISDDTLPFKQIIKDAQIIGDIDDVTSVVRELPGSPAIKKGILQSVKIVDELVKVMGHNPDNIVIEMARENQTTNRGRNQSQQRLKKLQDSLKELGSNILNEEKPSYIEGKVENNHLQDDRLFLYYIQNGKDMYTGDELDIDHLSDYDIDHIIPQAFIKDDSIDNRVLTSSAKNRGKSDDVPSLDIVHDRKADWIRLYKSGLISKRKFDNLTKAERGGLTENDKAGFIKRQLVETRQITKHVAQILDSRFNTERDENDKVIRNVKVITLKSNLVSQFRKDFKFYKVREINDYHHAHDAYLNAVVGTALLKKYPKLAPEFVYGEYKKYDIRKFITSSGDKATAKYFFYSNLMNFFKRVIRYSNGKVVVRPVIECSKDTGEIAWNKQTDFEKVRRVLSYPQVNIVKKVETQTGGFSKESILPKGNSDKLIPRKTKKFRWDTPKYGGFDSPNIAYSVFVIADVEKGKAKKLKTVKELVGISIMERSSFEENPVVFLEKKGYQNVQEDNLIKLPKYSLFEFEGGRRRLLASASELQKGNEVVLSRHLVELLYHAHRVNSFNNSEHLKYVSEHKKEFGEVLSCVENFAKSYVDVEKNLGKIRAVADKIDTFSIEDISISFVNLLTLTALGAPADFNFLGEKIPRKRYTSTKECLNATLIHQSITGLYETRIDLSKLGEE

SEQ ID NO: 113 - protein, 1372 aa, Streptococcus gallolyticus; identical to SEQ ID NO: 12

SEQ ID NO: 114 - protein, 1375 aa, Streptococcus infantarius
MEKSYSIGLDIGTNSVGWAVITDDYKVPAKKMKVLGNTDKKYIKKNLLGALLFDSGETAEVTRLKRTARRRYTRRKNRLRYLQEIFAKEMTKVDESFFQRLEESFLTDDDKTFDSHPIFGNKAEEDAYHQKFPTIYHLRKYLADSQEKADLRLVYLALAHMIKYRGHFLIEGELNAENTDVQKLFNVFVETYDKIVDESHLSEIEVDASSILTEKVSKSRRLENLIKQYPTEKKNTLFGNLIALALGLQPNFKTNFKLSEDAKLQFSKDTYEEDLEELLGKVGDDYADLFISAKNLYDAILLSGILTVDDNSTKAPLSASMIKRYVEHHEDLEKLKEFIKINKLKLYHDIFKDKTKNGYAGYIDNGVKQDEFYKYLKTILTKIDDSDYFLDKIERDDFLRKQRTFDNGSIPHQIHLQEMHSILRRQGDYYPFLKENQAKIEKILTFRIPYYVGPLARKDSRFAWANYHSDEPITPWNFDEVVDKEKSAEKFITRMTLNDLYLPEEKVLPKHSHVYETFTVYNELTKIKYVNEQGESFFFDANMKQEIFDHVFKENRKVTKAKLLSYLNNEFEEFRINDLIGLDKDSKSFNASLGTYHDLKKILDKSFLDDKTNGQIIEDIVLTLTLFEDRDMIHERLQKYSDFFTSQQLKKLERRHYTGWGRLSYKLINGIRNKENNKTILDFLIDDGHANRNFMQLINDESLSFKTIIQEAQVVGDVDDIEAVVHDLPGSPAIKKGILQSVKIVDELVKVMGDNPDNIVIEMARENQTTGYGRNKSNQRLKRLQDSLKEFGSDILSKKKPSYVDSKVENSHLQNDRLFLYYIQNGKDMYTGEELDIDRLSDYDIDHIIPQAFIKDNSIDNKVLTSSAKNRGKSDDVPSIEIVRNRRSYWYKLYKSGLISKRKFDNLTKAERGGLTEADKAGFIKRQLVETRQITKHVAQILDARFNTKRDENDKVIRDVKVITLKSNLVSQFRKEFKFYKVREINDYHHAHDAYLNAVVGTALLKKYPKLTPEFVYGEYKKYDVRKLIAKSSDDYSEMGKATAKYFFYSNLMNFFKTEVKYADGRVFERPDIETNADGEVVWNKQKDFDIVRKVLSYPQVNIVKKVEAQTGGFSKESILSKGDSDKLIPRKTKKVYWNTKKYGGFDSPTVAYSVLVVADIEKGKAKKLKTVKELVGISIMERSFFEENPVSFLEKKGYHNVQEDKLIKLPKYSLFEFEGGRRRLLASATELQKGNEVMLPAHLVELLYHAHRIDSFNSTEHLKYVSEHKKEFEKVLSCVENFSNLYVDVEKNLSKVRAAAESMTNFSLEEISASFINLLTLTALGAPADFNFLGEKIPRKRYTSTKECLSATLIHQSVTGLYETRIDLSKLGEE

SEQ ID NO: 115 - protein, 1368 aa, Streptococcus iniae
MRKPYSIGLDIGTNSVGWAVITDDYKVPSKKMRIQGTTDRTSIKKNLIGALLFDNGETAEATRLKRTTRRRYTRRKYRIKELQKIFSSEMNELDIAFFPRLSESFLVSDDKEFENHPIFGNLKDEITYHNDYPTIYHLRQTLADSDQKADLRLIYLALAHIIKFRGHFLIEGNLDSENTDVHVLFLNLVNIYNNLFEEDIVETASIDAEKILTSKTSKSRRLENLIAEIPNQKRNMLFGNLVSLALGLTPNFKTNFELLEDAKLQISKDSYEEDLDNLLAQIGDQYADLFIAAKKLSDAILLSDIITVKGASTKAPLSASMVQRYEEHQQDLALLKNLVKKQIPEKYKEIFDNKEKNGYAGYIDGKTSQEEFYKYIKPILLKLDGTEKLISKLEREDFLRKQRTFDNGSIPHQIHLNELKAIIRRQEKFYPFLKENQKKIEKLFTFKIPYYVGPLANGQSSFAWLKRQSNESITPWNFEEVVDQEASARAFIERMTNFDTYLPEEKVLPKHSPLYEMFMVYNELTKVKYQTEGMKRPVFLSSEDKEEIVNLLFKKERKVTVKQLKEEYFSKMKCFHTVTILGVEDRFNASLGTYHDLLKIFKDKAFLDDEANQDILEEIVWTLTLFEDQAMIERRLVKYADVFEKSVLKKLKKRHYTGWGRLSQKLINGIKDKQTGKTILGFLKDDGVANRNFMQLINDSSLDFAKIIKNEQEKTIKNESLEETIANLAGSPAIKKGILQSIKIVDEIVKIMGQNPDNIVIEMARENQSTMQGIKNSRQRLRKLEEVHKNTGSKILKEYNVSNTQLQSDRLYLYLLQDGKDMYTGKELDYDNLSQYDIDHIIPQSFIKDNSIDNTVLTTQASNRGKSDNVPNIETVNKMKSFWYKQLKSGAISQRKFDHLTKAERGALSDFDKAGFIKRQLVETRQITKHVAQILDSRFNSNLTEDSKSNRNVKIITLKSKMVSDFRKDFGFYKLREVNDYHHAQDAYLNAVVGTALLKKYPKLEAEFVYGDYKHYDLAKLMIQPDSSLGKATTRMFFYSNLMNFFKKEIKLADDTIFTRPQIEVNTETGEIVWDKVKDMQTIRKVMSYPQVNIVMKTEVQTGGFSKESIWPKGDSDKLIARKKSWDPKKYGGFDSPIIAYSVLVVAKIAKGKTQKLKTIKELVGIKIMEQDEFEKDPIAFLEKKGYQDIQTSSIIKLPKYSLFELENGRKRLLASAKELQKGNELALPNKYVKFLYLASHYTKFTGKEEDREKKRSYVESHLYYFDEIMQIIVEYSNRYILADSNLIKIQNLYKEKDNFSIEEQAINMLNLFTFTDLGAPSAFKFFNGDIDRKRYSSTNEIINSTLIYQSPTGLYETRIDLSKLGGK

SEQ ID NO: 116 - protein, 1273 aa, Streptococcus iniae
  VARIANT 1267: note = Any amino acid
MRKPYSIGLDIGTNSVGWAVITDDYKVPSKKMRIQGTTDRTSIKKNLIGALLFDNGETAEATRLKRTTRRRYTRRKYRIKELQKIFSSEMNELDIAFFPRLSESFLVSDDKEFENHPIFGNLKDEITYHNDYPTIYHLRQTLADSDQKADLRLIYLALAHIIKFRGHFLIEGNLDSENTDVHVLFLNLVNIYNNLFEEDIVETASIDAEKILTSKTSKSRRLENLIAEIPNQKRNMLFGNLVSLALGLTPNFKTNFELLEDAKLQISKDSYEEDLDNLLAQIGDQYADLFIAAKKLSDAILLSDIITVKGASTKAPLSASMVQRYEEHQQDLALLKNLVKKQIPEKYKEIFDNKEKNGYAGYIDGKTSQEEFYKYIKPILLKLDGTEKLISKLEREDFLRKQRTFDNGSIPHQIHLNELKAIIRRQEKFYPFLKENQKKIEKLFTFKIPYYVGPLANGQSSFAWLKRQSNESITPWNFEEVVDQEASARAFIERMTNFDTYLPEEKVLPKHSPLYEMFMVYNELTKVKYQTEGMKRPVFLSSEDKEEIVNLLFKKERKVTVKQLKEEYFSKMKCFHTVTILGVEDRFNASLGTYHDLLKIFKDKAFLDDEANQDILEEIVWTLTLFEDQAMIERRLVKYADVFEKSVLKKLKKRHYTGWGRLSQKLINGIKDKQTGKTILGFLKDDGVANRNFMQLINDSSLDFAKIIKNEQEKTIKNESLEETIANLAGSPAIKKGILQSIKIVDEIVKIMGQNPDNIVIEMARENQSTMQGIKNSRQRLRKLEEVHKNTGSKILKEYNVSNTQLQSDRLYLYLLQDGKDMYTGKELDYDNLSQYDIDHIIPQSFIKDNSIDNTVLTTQASNRGKSDNVPNIETVNKMKSFWYKQLKSGAISQRKFDHLTKAERGALSDFDKAGFIKRQLVETRQITKHVAQILDSRFNSNLTEDSKSNRNVKIITLKSKMVSDFRKDFGFYKLREVNDYHHAQDAYLNAVVGTALLKKYPKLEAEFVYGDYKHYDLAKLMIQPDSSLGKATTRMFFYSNLMNFFKKEIKLADDTIFTRPQIEVNTETGEIVWDKVKDMQTIRKVMSYPQVNIVMKTEVQTGGFSKESIWPKGDSDKLIARKKSWDPKKYGGFDSPIIAYSVLVVAKIAKGKTQKLKTIKELVGIKIMEQDEFEKDPIAFLEKKGYQDIQTSSIIKLPKYSLFELENGRKRLLASAKELQKGNELALPNKYVKFLYLASHYTKFTGKEEDREKKRSYVESHLYYFXEVKSSF

SEQ ID NO: 117 - protein, 1267 aa, Streptococcus iniae
  VARIANT 1265: note = Any amino acid
  VARIANT 1267: note = Any amino acid
MRKPYSIGLDIGTNSVGWAVITDDYKVPSKKMRIQGTTDRTSIKKNLIGALLFDNGETAEATRLKRTTRRRYTRRKYRIKELQKIFSSEMNELDIAFFPRLSESFLVSDDKEFENHPIFGNLKDEITYHNDYPTIYHLRQTLADSDQKADLRLIYLALAHIIKFRGHFLIEGNLDSENTDVHVLFLNLVNIYNNLFEEDIVETASIDAEKILTSKTSKSRRLENLIAEIPNQKRNMLFGNLVSLALGLTPNFKTNFELLEDAKLQISKDSYEEDLDNLLAQIGDQYADLFIAAKKLSDAILLSDIITVKGASTKAPLSASMVQRYEEHQQDLALLKNLVKKQIPEKYKEIFDNKEKNGYAGYIDGKTSQEEFYKYIKPILLKLDGTEKLISKLEREDFLRKQRTFDNGSIPHQIHLNELKAIIRRQEKFYPFLKENQKKIEKLFTFKIPYYVGPLANGQSSFAWLKRQSNESITPWNFEEVVDQEASARAFIERMTNFDTYLPEEKVLPKHSPLYEMFMVYNELTKVKYQTEGMKRPVFLSSEDKEEIVNLLFKKERKVTVKQLKEEYFSKMKCFHTVTILGVEDRFNASLGTYHDLLKIFKDKAFLDDEANQDILEEIVWTLTLFEDQAMIERRLVKYADVFEKSVLKKLKKRHYTGWGRLSQKLINGIKDKQTGKTILGFLKDDGVANRNFMQLINDSSLDFAKIIKNEQEKTIKNESLEETIANLAGSPAIKKGILQSIKIVDEIVKIMGQNPDNIVIEMARENQSTMQGIKNSRQRLRKLEEVHKNTGSKILKEYNVSNTQLQSDRLYLYLLQDGKDMYTGKELDYDNLSQYDIDHIIPQSFIKDNSIDNTVLTTQASNRGKSDNVPNIETVNKMKSFWYKQLKSGAISQRKFDHLTKAERGALSDFDKAGFIKRQLVETRQITKHVAQILDSRFNSNLTEDSKSNRNVKIITLKSKMVSDFRKDFGFYKLREVNDYHHAQDAYLNAVVGTALLKKYPKLEAEFVYGDYKHYDLAKLMIQPDSSLGKATTRMFFYSNLMNFFKKEIKLADDTIFTRPQIEVNTETGEIVWDKVKDMQTIRKVMSYPQVNIVMKTEVQTGGFSKESIWPKGDSDKLIARKKSWDPKKYGGFDSPIIAYSVLVVAKIAKGKTQKLKTIKELVGIKIMEQDEFEKDPIAFLEKKGYQDIQTSSIIKLPKYSLFELENGRKRLLASAKELQKGNELALPNKYVKFLYLASHYTKFTGKEEDREKKRSYVESHLYXFX

SEQ ID NO: 118 - protein, 200 aa, Streptococcus iniae
MEQDEFEKDPIAFLEKKGYQDIQTSSIIKLPKYSLFELENGRKRLLASAKELQKGNELALPNKYVKFLYLASHYTKFTGKEEDREKKRSYVESHLYYFDEIMQIIVEYSNRYILADSNLIKIQNLYKEKDNFSIEEQAINMLNLFTFTDLGAPSAFKFFNGDIDRKRYSSTNEIINSTLIYQSPTGLYETRIDLSKLGGK

SEQ ID NO: 119 - protein, 1281 aa, Streptococcus iniae
MRKPYSIGLDIGTNSVGWAVITDDYKVPSKKMRIQGTTDRTSIKKNLIGALLFDNGETAEATRLKRTTRRRYTRRKYRIKELQKIFSSEMNELDIAFFPRLSESFLVSDDKEFENHPIFGNLKDEITYHNDYPTIYHLRQTLADSDQKADLRLIYLALAHIIKFRGHFLIEGNLDSENTDVHVLFLNLVNIYNNLFEEDIVETASIDAEKILTSKTSKSRRLENLIAEIPNQKRNMLFGNLVSLALGLTPNFKTNFELLEDAKLQISKDSYEEDLDNLLAQIGDQYADLFIAAKKLSDAILLSDIITVKGASTKAPLSASMVQRYEEHQQDLALLKNLVKKQIPEKYKEIFDNKEKNGYAGYIDGKTSQEEFYKYIKPILLKLDGTEKLISKLEREDFLRKQRTFDNGSIPHQIHLNELKAIIRRQEKFYPFLKENQKKIEKLFTFKIPYYVGPLANGQSSFAWLKRQSNESITPWNFEEVVDQEASARAFIERMTNFDTYLPEEKVLPKHSPLYEMFMVYNELTKVKYQTEGMKRPVFLSSEDKEEIVNLLFKKERKVTVKQLKEEYFSKMKCFHTVTILGVEDRFNASLGTYHDLLKIFKDKAFLDDEANQDILEEIVWTLTLFEDQAMIERRLVKYADVFEKSVLKKLKKRHYTGWGRLSQKLINGIKDKQTGKTILGFLKDDGVANRNFMQLINDSSLDFAKIIKNEQEKTIKNESLEETIANLAGSPAIKKGILQSIKIVDEIVKIMGQNPDNIVIEMARENQSTMQGIKNSRQRLRKLEEVHKNTGSKILKEYNVSNTQLQSDRLYLYLLQDGKDMYTGKELDYDNLSQYDIDHIIPQSFIKDNSIDNTVLTTQASNRGKSDNVPNIETVNKMKSFWYKQLKSGAISQRKFDHLTKAERGALSDFDKAGFIKRQLVETRQITKHVAQILDSRFNSNLTEDSKSNRNVKIITLKSKMVSDFRKDFGFYKLREVNDYHHAQDAYLNAVVGTALLKKYPKLEAEFVYGDYKHYDLAKLMIQPDSSLGKATTRMFFYSNLMNFFKKEIKLADDTIFTRPQIEVNTETGEIVWDKVKDMQTIRKVMSYPQVNIVMKTEVQTGGFSKESIWPKGDSDKLIARKKSWDPKKYGGFDSPIIAYSVLVVAKIAKGKTQKLKTIKELVGIKIMEQDEFEKDPIAFLEKKGYQDIQTSSIIKLPKYSLFELENGRKRLLASAKELQKGNELALPNKYVKFLYLASHYTKFTGKEEDREKKRSYVESHLYYFDVRLSQVFRVTNVEF

SEQ ID NO: 120 - protein, 1345 aa, Streptococcus intermedius
MKKPYSIGLDIGTNSVGWAVVTDDYKVPAKKMKVLGNTDKSHIKKNLLGALLFDSGNTAEDRRLKRTARRRYTRRRNRILYLQEIFSEEMGKVDDSFFHRLEDSFLVTEDKRGERHPIFGNLEEEVKYHENFPTIYHLRQYLADNPEKTDLRLVYLALAHIIKFRGHFLIEGKFDTRNNDVQRLFQEFLAVYDNTFENSSLQEQNVQVEEILTDKISKSAKKDRVLKLFPNEKSNGRFAEFLKLIVGNQADFKKHFELEEKAPLQFSKDTYEEELEVLLAQIEDNYAELFLSAKKLYDSILLSGILTVTDVSTKAPLSASMIQRYNEHQMDLAQLKQFIRQKLSDKYNEVFSDVSKDGYAGYIDGKTNQEAFYKYLKGLLNKIEGSGYFLDKIEREDFLRKQRTFDNGSIPHQIHLQEMRAIIRRQAEFYPFLADNQDRIEKILTFRIPYYIGPLARGKSDFSWLSRKSADKITPWNFDEIVDKESSAEAFINRMTNYDLYLPNQKVLPRHSLLYEKFTVYNELTKVKYKTEQGKTAFFDANMKQEIFDGVFKVYRKVTKDKLMDFLEKEFDEFRIVDLTGLDKENKAFNASYGTYHDLRKILDKDFLDNSKNEKILEDIVLTLTLFEDREMIRKRLENYSDLLTKEQVKNLERRHYTGWGRLSAELIHGIRNKESRKTILDYLIDDGNSNRNFMQLINDDALSFKEEIAKAQVIGETDNLNQVVSDIAGSPAIKKGILQSLKIVDELVKIMGHQPENIVVEMARENQFTNQGRRNSQQRLKGLTDSIKEFGSQILKEHPVENSQLQNDRLFLYYLQNGRDMYTGEELDIDYLSQYDIDHIIPQAFIKDNSIDNRVLTSSKENRGKSDDVPSKDVVRKMKSYWSKLLSAKLITQRKFDNLTKAERGGLTDDDKAGFIKRQLVETRQITKHVARILDERFNTETDENNKKIRQVKIVTLKSNLVSNFRKEFELYKVREINDYHHAHDAYLNAVIGKALLGVYPQLEPEFVYGDYPHFHGHKENKATAKKFFYSNIMNFFKKDDVRTDKNGEIIWKKDEHISNIKKVLSYPQVNIVKKVEEQTGGFSKESILPKGNSDKLIPRKTKKFYWDTKKYGGFDSPIVAYSILVIANIEKGKSKKLKLVKDLVGITIMERTIFEKNPVAFLERKGYRNVQEENIVKLPKYSLFELENGRRRLLASARELQKGNEIVLPNHLGTMLYHAKNIHKVDEPKHLDYVKKHKDEFKELLDVVSNFSKKNILAESNLEKIEELYAQNNNKDITELASSFINLLTFTAIGAPAAFKFFDNNIDRKRYTSTTEILNATLIHQSITGLYETRIDLSRLGGD

SEQ ID NO: 121 - protein, 1353 aa, Streptococcus massiliensis
MKKPYSIGLDIGTNSVGWAVVMEDYKVPSKKMKVLGNTDKQSIKKNLIGALLFDSGETAVERRLNRTTSRRYDRRRNRIRYLQHIFAEEMNRADENFFHRLKESFFVEEDKTYSKYPIFGTLEEEKNYHKNYPTIYHLRKTLADTPDKMDIRLIYLALAHIIKYRGHFLIEGDLDIENIGIQDSFKSFIEEYNTQFGTKLDSTTKVEAIFTENSSKAKRVETILGLFPDETAAGNLDKFLKLMLGNQADFKKVFDLEEKITLQFSKDSYEEDLELLLSKIDEEYAALFDLAKKVYDAVLLSNILTVKEKNTKAPLSASMIKRYEEHKDDLKAFKRFFRERLPEKYETMFKDLTKPSYAAYVSGLYKKDAKRGLVPTSKRVTEDDFYKFSKGLLIDVEGAEYFLEKIEREDFLRKQRTFDNGAIPNQVHVKELQAIILNQSKYYPFLAENKEKIEKILTFRIPYYVGPLARGNSSFAWLQRKSDEAIRPWNFEQVVDMETSASRFIERMTLHDLYLPDEKVLPRHSLIYEKYTVFNELTKVRFTPEGGKEVYFSKTDKENIFDSLFKRYRKVTKRKLKDFIEKELGYGYIDIDNIKGVEEQFNASYTTYQDLLKIIGDKEFLDNEENKDLLEEIIYILTVFEDRKMIEKRLSELNIPFENKIIKKLARKKYTGWGNLSRKLIDGIRNRETNRTILGHLIDDGFSNRNLMQLINDDGLDFKEIIRKAQTIENIDTNQALVSSLPGSPAIKKGILQSLNIVDEIIAIMGYAPTNIVIEMARENQTTQKGRDNSAQRLKKIEDGIKLLGSDLLKQNPIQDNKDLQKEKLFLYYMQNGIDLYTGQPLNCDPDSLAFYDVDHIVPRSYIKNDSFDNKVLTTSKGNRKKLDDVPAKEVVEKMENTWRRLHAAGLISDIKLSYLMKGELTEEDKAGFIRRQLVETRQITKHVARLLDEKLNRKKNENGEKLRTTKIITLKSVFASRFRANFDLYKLRELNHYHHAHDAYLNAVVAQALLKVYPKFERELVYGSYVKESIFSRKISATERMRMYNNILKFISKDKKVDQETGEIVWDKKEIENIVKKVIYSSPVNIVKKREEQSGALFKQSNMAVGYNNKLIPRKKDWSVDKYGGFIEPAESYSLAIFYTDINGKKPKKKSTIIAISRMEKKDYEKEPERFLAQKGFERVEKTIKLPKYSLFEMEKGRRRLLASSGELQKGNQVLLPEHLIRLLSYAKKVDVLVKSKDDDYDLEEHRAEFAELLDCIKKFNDMYILASSNMSKIEEIYQKNIDAPIEEVARSFVALLNFTMMGAATDFKFFGQIIPRKRYPSTTECLKSTLIHQSVTGLYETRIDLSKLGEN

SEQ ID NO: 122 - protein, 1376 aa, Streptococcus oralis
MNNKPYSIGLDIGTNSVGWAVITDDYKVPSKKMKVLGNTDKHFIKKNLLGALLFDEGTTAEDRRLKRTARRRYTRRKNRLRYLQEIFTEEMSKVDISFFHRLDDSFLVPEDKRGSKYPIFATLEEEKEYHKNFPTIYHLRKHLADSKEKADFRLIYLALAHIIKYRGHFLYEESFDIKNNDIQKIFNEFISIYDNTFEGSSLNGQNAQVEAIFTDKISKSAKRERVLKLFPDEKSTGLFSEFLKLIVGNQADFKKHFDLEEKAPLQFSKDTYDEDLENLLVQIGDDFADLFLVAKKLYDAILLSGILTVTDPSTKAPLSASMIDRYENHQKDLAALKQFIKTNLPEKYDEVFSDQSKDGYAGYIDGKTTQEAFYKYIKNLLSKLEGADYFLDKIEREDFLRKQRTFDNGSIPHQIHLQEMNAIIRRQGEHYPFLQENKEKIEKILTFRIPYYVGPLARGNRDFAWLTRNSDQAIRPWNFEEIVDKARSAEDFINKMTNYDLYLPEEKVLPKHSLLYETFAVYNELTKVKFIAEGLRDYQFLDSGQKQQIVTQLFKEKRKVTEKDIIQYLHNVDSYDGIELKGIEKQFNASLSTYHDLLKIIKDKEFMDDSKNEAILENIVHTLTIFEDREMIKQRLAHYASIFDEKVIKALTRRHYTGWGKLSAKLINGIYDKQSKKTILDYLIDDGEINRNFMQLINDDGLSFKEIIQKAQVVGKTNDVKQVVQELPGSPAIKKGILQSIKLVDELVKVMGHAPESIVIEMARENQTTARGKKNSQQRYKRIEDALKNLAHGLDSNILKEHPTDNIQLQNDRLFLYYLQNGKDMYTGKSLDINQLSSCDIDHIIPQAFIKDDSLDNRVLTSSKDNRGKSDNVPSLEIVQKRKAFWQQLLDSKLISERKFNNLTKAERGGLDERDKVGFIKRQLVETRQITKHVAQILDARFNTEVTEKDKKDRSVKIITLKSNLVSNFRKEFRLYKVREINDYHHAHDPYLNAVVAKAILKKYPKLEPEFVYGDYQKYDLKRYISRTKDPKEVEKATEKYFFYSNLLNFFKEEVHYADGTIVKRENIEYSKDTGEIAWNKEKDFATIKKVLSLPQVNIVKKTEEQTVGQNGGLFDNNIVSKKKVVDASKLTPIKSGLSPEKYGGYARPTIAYSVLVIADIEKGKAKKLKRIKEMVGITVQDKKKFEANPIAYLEECGYKNINPNLIIKLPKYSLFEFNNGQRRLLASSIELQKGNELIVPYHFTALLYHAQRINKISEPIHKQYVETHQSEFKELLTAIISLSKKYIQKPNVESLLQQAFDQSDKDIYQLSESFISLLKLISFGAPGTFKFLGVEISQSNVRYQSVSSCFNATLIHQSITGLYETRIDLSKLGED

SEQ ID NO: 123 - protein, 1370 aa, Streptococcus gordonii; identical to SEQ ID NO: 13

SEQ ID NO: 124 - protein, 1345 aa, Streptococcus mutans
MKKPYSIGLDIGTNSVGWAVVTDDYKVPAKKMKVLGNTDKSHIEKNLLGALLFDSGNTAEDRRLKRTARRRYTRRRNRILYLQEIFSEEMGKVDDSFFHRLEDSFLVTEDKRGERHPIFGNLEEEVKYHENFPTIYHLRQYLADNPEKVDLRLVYLALAHIIKFRGHFLIEGKFDTRNNDVQRLFQEFLAVYDNTFENSSLQEQNVQVEEILTDKISKSAKKDRVLKLFPNEKSNGRFAEFLKLIVGNQADFKKHFELEEKAPLQFSKDTYEEELEVLLAQIGDNYAELFLSAKKLYDSILLSGILTVTDVGTKAPLSASMIQRYNEHQMDLAQLKQFIRQKLSDKYNEVFSDVSKDGYAGYIDGKTNQEAFYKYLKGLLNKIEGSGYFLDKIEREDFLRKQRTFDNGSIPHQIHLQEMRAIIRRQAEFYPFLADNQDRIEKLLTFRIPYYVGPLARGKSDFAWLSRKSADKITPWNFDEIVDKESSAEAFINRMTNYDLYLPNQKVLPKHSLLYEKFTVYNELTKVKYKTEQGKTAFFDANMKQEIFDGVFKVYRKVTKDKLMDFLEKEFDEFRIVDLTGLDKENKVFNASYGTYHDLCKILDKDFLDNSKNEKILEDIVLTLTLFEDREMIRKRLENYSDLLTKEQVKKLERRHYTGWGRLSAELIHGIRNKESRKTILDYLIDDGNSNRNFMQLINDDALSFKEEIAKAQVIGETDNLNQVVSDIAGSPAIKKGILQSLKIVDELVKIMGHQPENIVVEMARENQFTNQGRRNSQQRLKGLTDSIKEFGSQILKEHPVENSQLQNDRLFLYYLQNGRDMYTGEELDIDYLSQYDIDHIIPQAFIKDNSIDNRVLTSSKENRGKSDDVPSKDVVRKMKSYWSKLLSAKLITQRKFDNLTKAERGGLTDDDKAGFIKRQLVETRQITKHVARILDERFNTETDENNKKIRQVKIVTLKSNLVSNFRKEFELYKVREINDYHHAHDAYLNAVIGKALLGVYPQLEPEFVYGDYPHFHGHKENKATAKKFFYSNIMNFFKKDDVRTDKNGEIIWKKDEHISNIKKVLSYPQVNIVKKVEEQTGGFSKESILPKGNSDKLIPRKTKKFYWDTKKYGGFDSPIVAYSILVIADIEKGKSKKLKTVKALVGVTIMEKMTFERDPVAFLERKGYRNVQEENIIKLPKYSLFKLENGRKRLLASARELQKGNEIVLPNHLGTLLYHAKNIHKVDEPKHLDYVDKHKDEFKELLDVVSNFSKKYTLAEGNLEKIKELYAQNNGEDLKELASSFINLLTFTAIGAPATFKFFDKNIDRKRYTSTTEILNATLIHQSITGLYETRIDLNKLGGD

SEQ ID NO: 125 - protein, 1345 aa, Streptococcus mutans
MKKPYSIGLDIGTNSVGWAVVTDDYKVPAKKMKVLGNTDKSHIEKNLLGALLFDSGNTAEDRRLKRTARRRYTRRRNRILYLQEIFSEEMGKVDDSFFHRLEDSFLVTEDKRGERHPIFGNLEEEVKYHENFPTIYHLRQYLADNPEKVDLRLVYLALAHIIKFRGHFLIEGKFDTRNNDVQRLFQEFLAVYDNTFENSSLQEQNVQVEEILTDKISKSAKKDRVLKLFPNEKSNGRFAEFLKLIVGNQADFKKHFELEEKAPLQFSKDTYEEELEVLLAQIGDNYAELFLSAKKLYDSILLSGILTVTDVGTKAPLSASMIQRYNEHQMDLAQLKQFIRQKLSDKYNEVFSDVSKDGYAGYIDGKTNQEAFYKYLKGLLNKIEGSGYFLDKIEREDFLRKQRTFDNGSIPHQIHLQEMRAIIRRQAEFYPFLADNQDRIEKLLTFRIPYYVGPLARGKSDFAWLSRKSADKITPWNFDEIVDKESSAEAFINRMTNYDLYLPNQKVLPKHSLLYEKFTVYNELIKVKYKTEQGKTAFFDANMKQEIFDGVFKVYRKVTKDKLMDFLEKEFDEFRIVDLTGLDKENKVFNASYGTYHDLCKILDKDFLDNSKNEKILEDIVLTLTLFEDREMIRKRLENYSDLLTKEQVKKLERRHYTGWGRLSAELIHGIRNKESRKTILDYLIDDGNSNRNFMQLINDDALSFKEEIAKAQVIGETDNLNQVVSDIAGSPAIKKGILQSLKIVDELVKIMGHQPENIVVEMARENQFTNQGRRNSQQRLKGLTDSIKEFGSQILKEHPVENSQLQNDRLFLYYLQNGRDMYTGEELDIDYLSQYDIDHIIPQAFIKDNSIDNRVLTSSKENRGKSDDVPSKDVVRKMKSYWSKLLSAKLITQRKFDNLTKAERGGLTDDDKAGFIKRQLVETRQITKHVARILDERFNTETDENNKKIRQVKIVTLKSNLVSNFRKEFELYKVREINDYHHAHDAYLNAVIGKALLGVYPQLEPEFVYGDYPHFHGHKENKATAKKFFYSNIMNFFKKDDVRTDKNGEIIWKKDEHISNIKKVLSYPQVNIVKKVEEQTGGFSKESILPKGNSDKLIPRKTKKFYWDTKKYGGFDSPIVAYSILVIADIEKGKSKKLKTVKALVGVTIMEKMTFERDPVAFLERKGYRNVQEENIIKLPKYSLFKLENGRKRLLASARELQKGNEIVLPNHLGTLLYHAKNIHKVDEPKHLDYVDKHKDEFKELLDVVSNFSKKYTLAEGNLEKIKELYAQNNGEDLKELASSFINLLTFTAIGAPATFKFFDKNIDRKRYTSTTEILNATLIHQSITGLYETRIDLNKLGGD

SEQ ID NO: 126 - protein, 1345 aa, Streptococcus mutans
MKKPYSIGLDIGTNSVGWAVVTDDYKVPAKKMKVLGNTDKSHIKKNLLGALLFDSGNTAEDRRLKRTARRRYTRRRNRILYLQEIFSEEMGKVDDSFFHRLDESFLTDDDKNFDSYPIFGNKAEEDAYHQKFPTIYHLRKHLADSTEKADLRLVYLALAHMIKFRGHFLIEGELNAENTDVQKLFADFVGVYDRTFDDSHLSEITVDASSILTEKISKSRRLEKLINNYPKEKKNTLFRNLVALSLGLQPNFKTNFKLSEDAKLQFSKDTYEEDLEELLGKIGDDYADLFTLAKNLYDAILLSGILTADDSSTKAPLSASMIKRYAEHHEDLEKLKEFIKANKPELYHDIFKDETKNGYAGYIENGVKQDEFYKYLKNTLSKIAGSDYFLDKIEREDFLRKQRTFDNGSIPHQIHLQEMHAILRRQGDYYPFLKENQDRIEKILTFRIPYYVGPLARGKSDFAWLSRKSADKITPWNFDEIVDKESSVEAFINRMTNYDLYLPNQKVLPKHSLLYEKFTVYNELTKVKYKTEQGKTAFFDANMKQEIFDGVFKVYRKVTKDKLMDFLEKEFDEFRIVDLTGLDKENKAFNASYGTYHDLRKILDKDFLDNSKNEKILEDIVLTLTLFEDREMIRKRLKNYSDLLTKEQLKKLERRHYTGWGRLSAELIHGIRNKESRKTILDYLIDDGNSNRNFMQLINDDALSFKEEIAKAQVIGETDNLNQVVSDIAGSPAIKKGILQSLKIVDELVKIMGHQPENIVVEMARENQFTNQGRRNSQQRLKGLTDSIKEFGSQILKEHPVENSQLQNDRLFLYYLQNGRDMYTGEELDIDYLSQYDIDHIIPQAFIKDNSIDNRVLTSSKENRGKSDDVPSKDVVRKMKSYWSKLLSAKLITQRKFDNLTKGERGGLTDDDKAGFIKRQLVETRQITKHVARILDERFNTETDENNKKIRQVKIVTLKSNLVSNFRKEFELYKVREINDYHHAHDAYLNAVIGKALLGVYPQLEPEFVYGDYPHFHGHKENKATAKKFFYSNIMNFFKKDDVRTDKNGEIIWKKDEYISNIKKVLSYPQVNIVKKVEEQTGGFSKESILPKGDSDKLIPRKTKKFYWDTKKYGGFDSPIVAYSILVIADIEKGKSKKLKTVKALVGVTIMEKMTFERDPVAFLERKGYRNVQEENIIKLPKYSLFKLENGRKRLLASARELQKGNEIVLPNHLGTLLYHAKNIHKVDEPKHLDYVDKHKDEFKELLDVVSNFSKKYTLAEGNLEKIKELYAQNNGEDLKELASSFINLLTFTAIGAPATFKFFDKNIDRKRYTSTTEILNATLIHQSITGLYETRIDLSKLGGD

SEQ ID NO: 127 - protein, 1345 aa, Streptococcus mutans
MKKPYSIGLDIGTNSVGWAVVTDDYKVPAKKMKVLGNTDKSHIKKNLLGALLFDSGNTAEDRRLKRTARRRYTRRRNRILYLQEIFSEEMGKVDDSFFHRLEDSFLVTEDKRGERHPIFGNLEEEVKYHENFPTIYHLRQYLADNPEKTDLRLVYLALAHIIKFRGHFLIEGKFDTRNNDVQRLFQEFLAVYDNTFENSSLQEQNVQVEEILTDKISKSAKKDRVLKLFPNEKSNGRFAEFLKLIVGNQADFKKHFELEEKAPLQFSKDIYEEELEVLLAQIGDNYAELFLSAKKLYDSILLSGILTVTDVSTKAPLSASMIQRYNEHQMDLAQLKQFIRQKLSDKYNEVFSDVSKDGYAGYIDGKTNQEAFYKYLKGLLNKIEGSGYFLDKIEREDFLRKQRTFDNGSIPHQIHLQEMRAIIRRQAEFYPFLADNQDRIEKILTFRIPYYVGPLARGKSDFAWLSRKSADKITPWNFDEIVDKESSVEAFINRMTNYDLYLPNQKVLPKHSLLYEKFTVYNELTKVKYKTEQGKTAFFDANMKQEIFDGVFKVYRKVTKDKLMDFLEKEFDEFRIVDLTGLDKENKAFNASYGTYHDLRKILDKDFLDNSKNEKILEDIVLTLTLFEDREMIRKRLKNYSDLLTKEQLKKLERRHYTGWGRLSAELIHGIRNKESRKTILDYLIDDGNSNRNFMQLINDDALSFKEEIAKAQVIGETDNLNQVVSDIAGSPAIKKGILQSLKIVDELVKIMGHQPENIVVEMARENQFTNQGRRNSQQRLKGLTDSIKEFGSQILKEHPVENSQLQNDRLFLYYLQNGRDMYTGEELDIDYLSQYDIDHIIPQAFIKDNSIDNRVLTSSKENRGKSDDVPSKDVVRKMKSYWSKLLSAKLITQRKFDNLTKAERGGLTDDDKAGFIKRQLVETRQITKHVARILDERFNTETDENNKKIRQVKIVTLKSNLVSNFRKEFELYKVREINDYHHAHDAYLNAVIGKALLGVYPQLEPEFVYGDYPHFHGHKENKATAKKFFYSNIMNFFKKDDVRTDKNGEIIWKKDEHISNIKKVLSYPQVNIVKKVEEQTGGFSKESILPKGNSDKLIPRKTKKFYWDTKKYGGFDSPIVAYSILVIADIEKGKSKKLKTVKALVGVTIMEKMTFERDPVAFLERKGYRNVQEENIIKLPKYSLFKLENGRKRLLASARELQKGNEIVLPNHLGTLLYHAKNIHKVDEPKHLDYVDKHKDEFKELLDVVSNFSKKYTLAEGNLEKIKELYAQNNGEDLKELASSFINLLTFTAIGAPATFKFFDKNIDRKRYTSTTEILNATLIHQSITGLYETRIDLNKLGGD

SEQ ID NO: 128 - protein, 1345 aa, Streptococcus mutans
MKKPYSIGLDIGTNSVGWAVVTDDYKVPAKKMKVLGNTDKSHIKKNLLGALLFDSGNTAEDRRLKRTARRRYTRRRNRILYLQEIFSEEMGKVDDSFFHRLEDSFLVTEDKRGERHPIFGNLEEEVKYHENFPTIYHLRQYLADNPEKVDLRLVYLALAHIIKFRGHFLIEGKFDTRNNDVQRLFQEFLAVYDNTFENSSLQEQNVQVEEILTDKISKSAKKDRVLKLFPNEKSNGRFAEFLKLIVGNQADFKKHFELEEKAPLQFSKDTYEEELEVLLAQIGDNYAELFLSAKKLYDSILLSGILTVTDVSTKAPLSASMIQRYNEHQMDLAQLKQFIRQKLSDKYNEVFSDVSKDGYAGYIDGKTNQEAFYKYLKGLLNKIEGSGYFLDKIEREDFLRKQRTFDNGSIPHQIHLQEMRAIIRRQAEFYPFLADNQDRIEKILTFRIPYYVGPLARGKSDFAWLSRKSADKITPWNFDEIVDKESSAEAFINRMTNYDLYLPNQKVLPKHSLLYEKFTVYNELTKVKYKTEQGKTAFFDANMKQEIFDGVFKVYRKVTKDKLMDFLEKEFDEFRIVDLTGLDKENKVFNASYGTYHDLCKILDKDFLDNSKNEKILEDIVLTLTLFEDREMIRKRLENYSDLLTKEQVKKLERRHYTGWGRLSAELIHGIRNKESRKTILDYLIDDGNSNRNFMQLINDDALSFKEEIAKAQVIGETDNLNQVVSDIAGSPAIKKGILQSLKIVDELVKIMGHQPENIVVEMARENQFTNQGRQNSQQRLKGLTDSIKEFGSQILKEHPVENSQLQNDRLFLYYLQNGRDMYTGEELDIDYLSQYDIDHIIPQAFIKDNSIDNRVLTSSKENRGKSDDVPSEDVVRKMKSYWSKLLSAKLITQRKFDNLTKAERGGLTDDDKAGFIKRQLVETRQITKHVARILDERFYTETDENNKKIRQVKIVTLKSNLVSNFRKEFELYKVREINDYHHAHDAYLNAVIGKALLGVYPQLEPEFVYGDYPHFHGHKENKATAKKFFYSNIMNFFKKDDVRTDKNGEIIWKKDEHISNIKKVLSYPQVNIVKKVEEQTGGFSKESILPKGNSDKLIPRKTKKFYWDTKKYGGFDSPIVAYSILVIADIEKGKSKKLKTVKALVGVTIMEKMTFERDPVAFLERKGYRNVQEENIIKLPKYSLFKLENGRKRLLASARELQKGNEIVLPNHLGTLLYHAKNIHKVDEPKHLDYVDKHKDEFKELLDVVSNFSKKYTLAEGNLEKIKELYAQNNGEDLKELASSFINLLTFTAIGAPATFKFFDKNIDRKRYTSTTEILNATLIHQSITGLYETRIDLSKLGGD

SEQ ID NO: 129 - protein, 1345 aa, Streptococcus mutans
MKKPYSIGLDIGTNSVGWAVVTDDYKVPAKKMKVLGNTDKSHIKKNLLGALLFDSGNTAEDRRLKRTARRRYTRRRNRILYLQEIFSEEMGKVDDSFFHRLEDSFLVTEDKRGERHPIFGNLEEEVKYHENFPTIYHLRQYLADNPEKVDLRLVYLALAHIIKFRGHFLIEGKFDTRNNDVQRLFQEFLAVYDNTFENSSLQEQNVQVEEILTDKISKSAKKDRVLKLFPNEKSNGRFAEFLKLIVGNQADFKKHFELEEKAPLQFSKDTYEEDLEELLGKIGDDYADLFTLAKNLYDAILLSGILTADDSSTKAPLSASMIQRYNEHQMDLAQLKQFIRQKLSDKYNEVFSDVSKDGYAGYIDGKTNQEAFYKYLKGLLNKIEGSGYFLDKIEREDFLRKQRTFDNGSIPHQIHLQEMRAIIRRQAEFYPFLADNQDRIEKILTFRIPYYVGPLARGKSDFAWLSRKSADKITPWNFDEIVDKESSAEAFINRMTNYDLYLPNQKVLPKHSLLYEKFTVYNELTKVKYKTEQGKTAFFDANMKQEIFDGVFKVYRKVTKDKLMDFLEKEFDEFRIVDLTGLDKENKVFNASYGTYHDLCKILDKDFLDNSKNEKILEDIVLTLTLFEDREMIRKRLENYSDLLTKEQVKKLERRHYTGWGRLSAELIHGIRNKESRKTILDYLIDDGNSNRNFMQLINDDALSFKEEIAKAQVIGETDNLNQVVSDIAGSPAIKKGILQSLKIVDELVKIMGHQPENIVVEMARENQFTNQGRRNSQQRLKGLTDSIKEFGSQILKEHPVENSQLQNDRLFLYYLQNGRDMYTGEELDIDYLSQYDIDHIIPQAFIKDNSIDNRVLTSSKENRGKSDDVPSKDVVRKMKSYWSKLLSAKLITQRKFDNLTKAERGGLTDDDKAGFIKRQLVETRQITKHVARILDERFYTETDENNKKIRQVKIVTLKSNLVSNFRKEFELYKVREINDYHHAHDAYLNAVIGKALLGVYPQLEPEFVYGDYPHFHGHKENKATAKKFFYSNIMNFFKKDDVRTDKNGEIIWKKDEHISNIKKVLSYPQVNIVKKVEEQTGGFSKESILPKGNSDKLIPRKTKKFYWDTKKYGGFDSPIVAYSILVIADIEKGKSKKLKTVKALVGVTIMEKMTFERDPVAFLERKGYRNVQEENIIKLPKYSLFKLENGRKRLLASARELQKGNEIVLPNHLGTLLYHAKNIHKVDEPKHLDYVDKHKDEFKELLDVVSNFSKKYTLAEGNLEKIKELYAQNNGEDLKELASSFINLLTFTAIGAPATFKFFDKNIDRKRYTSTTEILNATLIHQSITGLYETRIDLSKLGGD

SEQ ID NO: 130 - protein, 1345 aa, Streptococcus mutans
MKKPYSIGLDIGTNSVGWAVVTDDYKVPAKKMKVLGNTDKSHIKKNLLGALLFDSGNTAEDRRLKRTARRRYTRRRNRILYLQEIFSEEMGKVDDSFFHRLEDSFLVTEDKRGERHPIFGNLEEEVKYHENFPTIYHLRQYLADNPEKVDLRLVYLALAHIIKFRGHFLIEGKFDTRNNDVQRLFQEFLAVYDNTFENSSLQEQNVQVEEILTDKISKSAKKDRVLKLFPNEKSNGRFAEFLKLIVGNQADFKKHFELEEKAPLQFSKDTYEEDLEELLGKIGDDYADLFTLAKNLYDAILLSGILTADDSSTKAPLSASMIQRYNEHQMDLAQLKQFIRQKLSDKYNEVFSDVSKDGYAGYIDGKTNQEAFYKYLKGLLNKIEGSGYFLDKIEREDFLRKQRTFDNGSIPHQIHLQEMRAIIRRQAEFYPFLADNQDRIEKILTFRIPYYVGPLARGKSDFAWLSRKSADKITPWNFDEIVDKESSAEAFINRMTNYDLYLPNQKVLPKHSLLYEKFTVYNELTKVKYKTEQGKTAFFDANMKQEIFDGVFKVYRKVTKDKLMDFLEKEFDEFRIVDLTGLDKENKVFNASYGTYHDLCKILDKDFLDNSKNEKILEDIVLTLTLFEDREMIRKRLENYSDLLTKEQVKKLERRHYTGWGRLSAELIHGIRNKESRKTILDYLIDDGNSNRNFMQLINDDALSFKEEIAKAQVIGETDNLNQVVSDIAGSPAIKKGILQSLKIVDELVKIMGHQPENIVVEMARENQFTNQGRRNSQQRLKGLTDSIKEFGSQILKEHPVENSQLQNDRLFLYYLQNGRDMYTGEELDIDYLSQYDIDHIIPQAFIKDNSIDNRVLTSSKENRGKSDDVPSKDVVRKMKPYWSKLLSAKLITQRKFDNLTKAERGGLTDDDKAGFIKRQLVETRQITKHVARILDERFNTETDENNKKIRQVKIVTLKSNLVSNFRKEFELYKVREINDYHHAHDAYLNAVIGKALLGVYPQLEPEFVYGDYPHFHGHEENKATAKKFFYSNIMNFFKKDDVRTDKNGEIIWKKDEHISNIKKVLSYPQVNIVKKVEEQTGGFSKESILPKGNSDKLIPRKTKKFYWDTKKYGGFDSPIVAYSILVIADIEKGKSKKLKTVKALVGVTIMEKMTFERDPVAFLERKGYRNVQEENIIKLPKYSLFKLENGRKRLLASARELQKGNEIVLPNHLGTLLYHAKNIHKVDEPKHLDYVDKHKDEFKELLDVVSNFSKKYTLAEGNLEKIKELYAQNNGEDLKELASSFINLLTFTAIGAPATFKFFDKNIDRKRYTSTTEILNATLIHQSITGLYETRIDLSKLGGD

SEQ ID NO: 131 - protein, 1345 aa, Streptococcus mutans
MKKPYSIGLDIGTNSVGWAVVTDDYKVPAKKMKVLGNTDKSHIKKNLLGALLFDSGNTAEDRRLKRTARRRYTRRRNRILYLQEIFSEEMGKVDDSFFHRLEDSFLVTEDKRGERHPIFGNLEEEVKYHENFPTIYHLRQYLADNPEKVDLRLVYLALAHIIKFRGHFLIEGKFDTRNNDVQRLFQEFLAVYDNTFENSSLQEQNVQVEEILTDKISKSAKKDRVLKLFPNEKSNGRFAEFLKLIVGNQADFKKHFELEEKAPLQFSKDTYEEELEVLLAQIGDNYAELFLSAKKLYDSILLSGILTVTDVSTKAPLSASMIQRYNEHQMDLAQLKQFIRQKLSDKYNEVFSDVSKDGYAGYIDGKTNQEAFYKYLKGLLNKIEGSGYFLDKIEREDFLRKQRTFDNGSIPHQIHLQEMRAIIRRQAEFYPFLADNQDRIEKILTFRIPYYVGPLARGKSDFAWLSRKSADKITPWNFDEIVDKESSAEAFINRMTNYDLYLPNQKVLPKHSLLYEKFTVYNELTKVKYKTEQGKTAFFDANMKQEIFDGVFKVYRKVTKDKLMDFLEKEFDEFRIVDLTGLDKENKVFNASYGTYHDLCKILDKDFLDNSKNEKILEDIVLTLTLFEDREMIRKRLENYSDLLTKEQVKKLERRHYTGWGRLSAELIHGIRNKESRKTILDYLIDDGNSNRNFMQLINDDALSFKEEIAKAQVIGETDNLNQVVSDIAGSPAIKKGILQSLKIVDELVKIMGHQPENIVVEMARENQFTKQGRRNSQQRLKGLTDSIKEFGSQILKEHPVENSQLQNDRLFLYYLQNGRDMYTGEELDIDYLSQYDIDHIIPQAFIKDNSIDNRVLTSSKENRGKSDDVPSKDVVRKMKSYWSKLLSAKLITQRKFDNLTKAERGGLTDDDKAGFIKRQLVETRQITKHVARILDERFYTETDENNKKIRQVKIVTLKSNLVSNFRKEFELYKVREINDYHHAHDAYLNAVIGKALLGVYPQLEPEFVYGDYPHFHGHKENKATAKKFFYSNIMNFFKKDDVRTDKNGEIIWKKDEHISNIKKVLSYPQVNIVKKVEEQTGGFSKESILPKGNSDKLIPRKTKKFYWDTKKYGGFDSPIVAYSILVIADIEKGKSKKLKTVKALVGVTIMEKMTFERDPVAFLERKGYRNVQEENIIKLPKYSLFKLENGRKRLLASARELQKGNEIVLPNHLGTLLYHAKNIHKVDEPKHLDYVDKHKDEFKELLDVVSNFSKKYTLAEGNLEKIKELYAQNNGEDLKELASSFINLLTFTAIGAPATFKFFDKNIDRKRYTSTTEILNATLIHQSITGLYETRIDLSKLGGD

SEQ ID NO: 132 - protein, 1345 aa, Streptococcus mutans
MKKPYSIGLDIGTNSVGWAVVTDDYKVPAKKMKVLGNTDKSHIKKNLLGALLFDSGNTAADRRLKRTARRRYTRRRNRILYLQEIFAEEMSKVDDSFFHRLEDSFLVTEDKRGERHPIFGNLEEEVKYHENFPTIYHLRQYLADNPEKVDLRLVYLALAHIIKFRGHFLIEGKFDTRNNDVQRLFQEFLAVYDNTFENSSLQEQNVQVEEILTDKISKSAKKDRVLKLFPNEKSNGRFAEFLKLIVGNQADFKKHFELEEKAPLQFSKDTYEEELEVLLTQIGDNYAELFLSAKKLYDSILLSGILTVTDVSTKAPLSASMIQRYNEHQMDLAQLKQFIRQKLSDKYNEVFSDVSKDGYAGYIDGKTNQEAFYKYLKGLLNKIEGSGYFLDKIEREDFLRKQRTFDNGSIPHQIHLQEMRAIIRRQAEFYPFLADNQDRIEKILTFRIPYYVGPLARGKSDFAWLSRKSADKITPWNFDEIVDKESSAEAFINRMTNYDLYLPNQKVLPKHSLLYEKFTVYNELTKVKYKTEQGKTAFFDANMKQEIFDGVFKVYRKVTKDKLMDFLEKEFDEFRIVDLTGLDKENKAFNASYGTYHDLRKILDKDFLDNSKNEKILEDIVLTLTLFEDREMIRKRLENYSDLLTKEQVKKLERRHYTGWGRLSAELIHGIRNKESRKTLLDYLIDDGNSNRNFMQLINDDALSFKEEIAKAQVIGETDNLNQVVSDIAGSPAIKKGILQSLKIVDELVKIMGHQPENIVVEMARENQFTNQGRRNSQQRLKGLTDSIKEFGSQILKEHPVENSQLQNDRLFLYYLQNGRDMYTGEELDIDYLSQYDIDHIIPQAFIKDNSIDNRVLTSSKENRGKSDDVPSKDVVRKMKPYWSKLLSAKLITQRKFDNLTKAERGGLTDDDKAGFIKRQLVETRQITKHVARILDERFNTETDENNKKIRQVKIVTLKSNLVSNFRKEFELYKVREINDYHHAHDAYLNAVIGKALLGVYPQLEPEFVYGDYPHFHGHEENKATAKKFFYSNIMNFFKKDDVRTDKNGEIIWKKDEHISNIKKVLSYPQVNIVKKVEEQTGGFSKESILPKGNSDKLIPRKTKKFYWDTKKYGGFDSPIVAYSILVIADIEKGKSKKLKTVKALVGVTIMEKMTFERDPVAFLERKGYRNVQEENIIKLPKYSLFKLENGRKRLLASARELQKGNEIVLPNHLGTLLYHAKNIHKVDEPKHLDYVDKHKDEFKELLDVVSNFSKKYTLAEGNLEKIKELYAQNNGEDLKELSSSFINLLTFTAIGAPAAFKFFDKNIDRKRYTSTTEILNATLIHQSITGLYETRIDLSKLGGD

SEQ ID NO: 133 - protein, 1345 aa, Streptococcus mutans
MKKPYSIGLDIGTNSVGWAVVTDDYKVPAKKMKVLGNTDKSHIKKNLLGALLFDSGNTAEDRRLKRTARRRYTRRRNRILYLQEIFSEEMGKVDDSFFHRLEDSFLVTEDKRGERHPIFGNLEEEVKYHENFPTIYHLRQYLADNPEKVDLRLVYLALAHIIKFRGHFLIEGKFDTRNNDVQRLFQEFLAVYDNTFENSSLQEQNVQVEEILTDKISKSAKKDRVLKLFPNEKSNGRFAEFLKLIVGNQADFKKHFELEEKAPLQFSKDTYEEELEVLLAQIGDNYAELFLSAKKLYDSILLSGILTVTDVSTKAPLSASMIQRYNEHQMDLAQLKQFIRQKLSDKYNEVFSDVSKDGYAGYIDGKTNQEAFYKYLKGLLNKIEGSGYFLDKIEREDFLRKQRTFDNGSIPHQIHLQEMRAIIRRQAEFYPFLADNQDRIEKILTFRIPYYVGPLARGKSDFAWLSRKSADKITPWNFDEIVDKESSAEAFINRMTNYDLYLPNQKVLPKHSLLYEKFTVYNELTKVKYKTEQGKTAFFDANMKQEIFDGVFKVYRKVTKDKLMDFLEKEFDEFRIVDLTGLDKENKVFNASYGTYHDLCKILDKDFLDNSKNEKILEDIVLTLTLFEDREMIRKRLENYSDLLTKEQVKKLERRHYTGWGRLSAELIHGIRNKESRKTILDYLIDDGNSNRNFMQLINDDALSFKEEIAKAQVIGETDNLNQVVSDIAGSPAIKKGILQSLKIVDELVKIMGHQPENIVVEMARENQFTKQGRRNSQQRLKGLTDSIKEFGSQILKEHPVENSQLQNDRLFLYYLQNGRDMYTGEELDIDYLSQYDIDHIIPQAFIKDNSIDNRVLTSSKENRGKSDDVPSKDVVRKMKSYWSKLLSAKLITQRKFDNLTKAERGGLTDDDKAGFIKRQLVETRQITKHVARILDERFYTETDENNKKIRQVKIVTLKSNLVSNFRKEFELYKVREINDYHHAHDAYLNAVIGKALLGVYPQLEPEFVYGDYPHFHGHKENKATAKKFFYSNIMNFFKKDDVRTDRNGEIIWKKDEHISNIKKVLSYPQVNIVKKVEEQTGGFSKESILPKGNSDKLIPRKTKKFYWDTKKYGGFDSPIVAYSILVIADIEKGKSKKLKTVKALVGVTIMEKMTFERDPVAFLERKGYRNVQEENIIKLPKYSLFKLENGRKRLLASARELQKGNEIVLPNHLGTLLYHAKNIHKVDEPKHLDYVDKHKDEFKELLDVVSNFSKKYTLAEGNLEKIKELYAQNNGEDLKELASSFINLLTFTAIGAPATFKFFDKNIDRKRYTSTTEILNATLIHQSITGLYETRIDLSKLGGD

SEQ ID NO: 134 - protein, 1355 aa, Streptococcus mutans
MKKSYSIGLDIGTNSVGWAVVTDDYKVPAKKMKVLGNTDKSHIKKNLLGALLFDSGNTAEDRRLKRTARRRYTRRRNRILYLQEIFSEEMGKVDDSFFHRLDESFLTDDDKNFDSHPIFGNKAEEDAYHQKFPTIYHLRKHLADSTEKADLRLVYLALAHMIKFRGHFLIEGELNAENTDVQKLFADFVGVYDRTFDDSHLSEITVDASSILTEKISKSRRLEKLINNYPKEKKNTLFGNLIALSLGLQPNFKTNFKLSEDAKLQFSKDTYEEDLEELLGKIGDDYADLFTLAKNLYDAILLSGILTADDSSTKAPLSASMIKRYAEHHEDLEKLKEFIKANKPELYHDIFKDETKNGYAGYIENGVKQDEFYKYLKNTLSKIAGSDYFLDKIEREDFLRKQRTFDNGSIPHQIHLQEMHAILRRQGDYYPFLKENQDRIEKILTFRIPYYVGPLARKNSRFAWAEYHSDEAVMPWNFDQVIDKESSAQAFIEHMTNNDLYLPNEKVLPKHSPLYEKYTVYNELTKIKYVTEIGEAKFFDANLKQEIFDGLFKHERKVTKKKLRTFLDKNFDEFRIVDIQGLDKETETFNASYATYQDLLKVIKDKVFMDNPENAEILENIVLTLTLFEDREMIKQRLAKYADVFDKKVIDQLARRHYTGWGRLSAKLLNGIRDKQSCKTIMDYLIDDAQSNRNLMQLITDDNLTFKDDIVKAQYVDNSDDLHQVVQSLAGSPAIKKGILQSLKIVDELVKVMGKEPEQIVVEMARENQTTAKGRRNSQQRYKRLKEAIKSLDRDLNHKILKEHPTDNQALQNNRLFLYYLQNGRDMYTGESLDINRLSDYDIDHVIPQAFIKDNSIDNRVLTSSKANRGKSDDVPSEDVVNRMRPFWNKLLSSGLISQRKYNNLTKKELTPDDKAGFIKRQLVETRQITKHVARMLDERFNKEFDDNNKRIRRVKIVTLKSNLVSSFRKEFELYKVREINDYHHAHDAYLNAVVVKALLVKYPKLEPEFVYGEYPKYNSYRERKTATQKMFFYSNIMNMFKSKVKLADDQIVERPMIEVNDETGEIAWDKTKHITTVKKVLSYPQVNIVKKVEEQTIGQNGGLFDDNPKSPLEVIPSKLVPLKKALNPEKYGGYQKPTTAYPILLIVDTKQLIPISVMDKKRFEQNPVKFLKDKGYQQIEKNNFVKLPKYTLVDIGNGIKRLWASSKEVHKGNQLVVSKKSQDLLYHAHHLDNDYSNEYVKNHYQQFDILFNEITSFSKKCKLGKEHIQKIEEAYSKERDSASIEELADGFIKLLGFTQLGATSPFSFLGIKLNQKQYTGKKDYLLPCMEATLIHQSITGLYETRIDLNKLGGD

SEQ ID NO: 135 - protein, 1345 aa, Streptococcus mutans
MKKPYSIGLDIGTNSVGWAVVTDDYKVPAKKMKVLGNTDKSHIKKNLLGALLFDSGNTAADRRLKRTARRRYTRRRNRILYLQEIFAEEMSKVDDSFFHRLEDSFLVTEDKRGERHPIFGNLEEEVKYHENFPTIYHLRQYLADNPEKVDLRLVYLALAHIIKFRGHFLIEGKFDTRNNDVQRLFQEFLAVYDNTFENSSLQEQNVQVEEILTDKISKSAKKDRVLKLFPNEKSNGRFAEFLKLIVGNQADFKKHFELEEKAPLQFSKDTYEEELEVLLAQIGDNYAELFLSAKKLYDSILLSGILTVTDVSTKAPLSASMIQRYNEHQMDLAQLKQFIRQKLSDKYNEVFSDVSKDGYAGYIDGKTNQEAFYKYLKGLLNKIEGSGYFLDKIEREDFLRKQRTFDNGSIPHQIHLQEMRAIIRRQAEFYPFLADNQDRIEKILTFRIPYYVGPLARGKSDFAWLSRKSADKITPWNFDEIVDKESSAEAFINRMTNYDLYLPNQKVLPKHSLLYEKFTVYNELTKVKYKTEQGKTAFFDANMKQEIFDGVFKVYRKVTKDKLMDFLEKEFDEFRIVDLTGLDKENKAFNASYGTYHDLRKILDKDFLDNSKNEKILEDIVLTLTLFEDREMIRKRLENYSDLLTKEQVKKLERRHYTGWGRLSAELIHGIRNKESRKTILDYLIDDGNSNRNFMQLINDDALSFKEEIAKAQVIGETDNLNQVVSDIAGSPAIKKGILQSLKIVDELVKIMGHQPENIVVEMARENQFTNQGRRNSQQRLKGLTDSIKEFGSQILKEHPVEHSQLQNDRLFLYYLQNGRDMYTGEELDIDYLSQYDIDHIIPQAFIKDNSIDNRVLTSSKENRGKSDDVPSKNVVRKMKSYWSKLLSAKLITQRKFDNLTKAERGGLTDDDKAGFIKRQLVETRQITKHVARILDERFHTETDENNKKIRQVKIVTLKSNLVSNFRKEFELYKVREINDYHHAHDAYLNAVIGKALLGVYPQLEPEFVYGDYPHFHGHKENKATAKKFFYSNIMNFFKKDDVRTDKNGEIIWKKDEHISNIKKVLSYPQVNIVKKVEEQTGGFSKESILPKGNSDKLIPRKTKKFYWDTKKYGGFDSPIVAYSILVIADIEKGKSKKLKTVKALVGVTIMEKMTFERDPVAFLERKGYRNVQEENIIKLPKYSLFKLENGRKRLLASARELQKGNEIVLPNHLGTLLYHAKNIHKVDEPKHLDYVDKHKDEFKELLDVVSNFSKKYTLAEGNLEKIKELYAQNNGEDLKELASSFINLLTFTAIGAPATFKFFDKNIDRKRYTSTTEILNATLIHQSITGLYETRIDLSKLGGD

SEQ ID NO: 136 - protein, 1345 aa, Streptococcus mutans
MKKPYSIGLDIGTNSVGWAVVTDDYKVPAKKMKVLGNTDKSHIEKNLLGALLFDSGNTAEDRRLKRTARRRYTRRRNRILYLQEIFSEEMGKVDDSFFHRLEDFFLVTEDKRGERHPIFGNLEEEVKYHENFPTIYHLRQYLADNPEKVDLRLVYLALAHIIKFRGHFLIEGKFDTRNNDVQRLFQEFLAVYDNTFENSSLQEQNVQVEEILTDKISKSAKKDRVLKLFPNEKSNGRFAEFLKLIVGNQADFKKHFELEEKAPLQFSKDTYEEELEVLLAQIGDNYAELFLSAKKLYDSILLSGILTADDSSTKAPLSASMIQRYNEHQMDLAQLKQFIRQKLSDKYNEVFSDVSKDGYAGYIDGKTNQEAFYKYLKGLLNKIEGSGYFLDKIEREDFLRKQRTFDNGSIPHQIHLQEMRAIIRRQSEFYPFLADNQDRIEKILTFRIPYYVGPLARGKSDFAWLSRKSADKITPWNFDEIVDKESSAEAFINRMTNYDLYLPNQKVLPKHSLLYEKFTVYNELTKVKYKTEQGETAFFDANMKQEIFDGVFKVYRKVTKDKLMDFLEKEFDEFRIVDLTGLDKENKAFNASYGTYHDLRKILDKDFLDNSKNEKILEDIVLTLTLFEDREMIRKRLKNYSDLLTKEQLKKLERRHYTGWGRLSAELIHGIRNKESRKTILDYLIDDGNSNRNFMQLINDDALSFKEEIAKAQVIGETDNLNQVVSDIAGSPAIKKGILQSLKIVDELVKIMGHQPENIVVEMARENQFTNQGRRNSQQRLKGLTDSIKEFGSQILKEHPVENSQLQNDRLFLYYLQNGRDMYTGEELDIDYLSQYDIDHIIPQAFIKDNSIDNRVLTSSKENRGKSDDVPSKDVVRKMKPYWSKLLSAKLITQRKFDNLTKAERGGLTDDDKAGFIKRQLVETRQITKHVARILDERFNTETDENNKKIRQVKIVTLKSNLVSNFRKEFELYKVREINDYHHAHDAYLNAVIGKALLGVYPQLEPEFVYGDYPHFHGHEENKATAKKFFYSNIMNFFKKDDVRTDKNGEIIWKKDEHISNIKKVLSYPQVNIVKKVEEQTGGFSKESILPKGNSDKLIPRKTKKFYWDTKKYGGFDSPIVAYSILVIADIEKGKSKKLKTVKALVGVTIMEKMTFERDPVAFLERKGYRNVQEENIIKLPKYSLFKLENGRKRLLASARELQKGNEIVLPNHLGTLLYHAKNIHKVDEPKHLDYVDKHKDEFKELLDVVSNFSKKYTLAEGNLEKIKELYAQNNGEDLKELASSFINLLTFTAIGAPATFKFFDKNIDRKRYTSTTEILNATLIHQSITGLYETRIDLSKLGGD

SEQ ID NO: 137 - protein, 1345 aa, Streptococcus mutans
MKKPYSIGLDIGTNSVGWAVVTDDYKVPAKKMKVLGNTDKSHIKKNLLGALLFDSGNTAEDRRLKRTARRRYTRRRNRILYLQEIFSEEMGKVDDSFFHRLDESFLTDDDKNFDSHPIFGNKAEEDAYHQKFPTIYHLRKHLADSTEKADLRLVYLALAHMIKFRGHFLIEGELNAENTDVQKLFADFVGVYDRTFDDSHLSEITVDASSILTEKISKSRRLEKLINNYPKEKKNTLFGNLIALSLGLQPNFKTNFKLSEDAKLQFSKDTYEEELEVLLAQIGDNYAELFLSAKKLYDSILLSGILTVTDVSTKAPLSASMIQRYNEHQMDLAQLKQFIRQKLSDKYNEVFSDVSKDGYAGYIDGKTNQEAFYKYLKGLLNKIEGSGYFLDKIEREDFLRKQRTFDNGSIPHQIHLQEMRAIIRRQAEFYPFLADNQDRIEKILTFRIPYYVGPLARGKSDFAWLSRKSADKITPWNFDEIVDKESSVEAFINRMTNYDLYLPNQKVLPKHSLLYEKFTVYNELTKVKYKTEQGKTAFFDANMKQEIFDGVFKVYRKVTKDKLMDFLEKEFDEFRIVDLTGLDKENKAFNASYGTYHDLRKILDKDFLDNSKNEKILEDIVLTLTLFEDREMIRKRLKNYSDLLTKEQLKKLERRHYTGWGRLSAELIHGIRNKESRKTILDYLIDDGNSNRNFMQLINDDALSFKEEIAKAQVIGETDNLNQVVSDIAGSPAIKKGILQSLKIVDELVKIMGHQPENIVVEMARENQFTNQGRRNSQQRLKGLTDSIKEFGSQILKEHPVENSQLQNDRLFLYYLQNGRDMYTGEELDIDYLSQYDIDHIIPQAFIKDNSIDNRVLTSSKENRGKSDDVPSKDVVRKMKSYWSKLLSAKLITQRKFDNLTKGERGGLTDDDKAGFIKRQLVETRQITKHVARILDERFNTETDENNKKIRQVKIVTLKSNLVSNFRKEFELYKVREINDYHHAHDAYLNAVIGKALLGVYPQLEPEFVYGDYPHFHGHKENKATAKKFFYSNIMNFFKKDDVRTDKNGEIIWKKDEYISNIKKVLSYPQVNIVKKVEEQTGGFSKESILPKGDSDKLIPRKTKKFYWDTKKYGGFDSPIVAYSILVIADIEKGKSKKLKTVKALVGVTIMEKMTFERDPVAFLERKGYRNVQEENIIKLPKYSLFKLENGRKRLLASARELQKGNEIVLPNHLGTLLYHAKNIHKVDEPKHLDYVDKHKDEFKELLDVVSNFSKKYTLAEGNLEKIKELYAQNNGEDLKELASSFINLLTFTAIGAPATFKFFDKNIDRKRYTSTTEILNATLIHQSITGLYETRIDLSKLGGD

SEQ ID NO: 138 - protein, 1345 aa, Streptococcus mutans
MKKPYSIGLDIGTNSVGWAVVTDDYKVPAKKMKVLGNTDKSHIKKNLLGALLFDSGNTAADRRLKRTARRRYTRRRNRILYLQEIFAEEMSKVDDSFFHRLEDSFLVTEDKRGERHPIFGNLEEEVKYHENFPTIYHLRQYLADNPEKVDLRLVYLALAHIIKFRGHFLIEGKFDTRNNDVQRLFQEFLAVYDNTFENSSLQEQNVQVEEILTDKISKSAKKDRVLKLFPNEKSNGRFAEFLKLIVGNQADFKKHFELEEKAPLQFSKDTYEEELEVLLAQIGDNYAELFLSAKKLYDSILLSGILTVTDVSTKAPLSASMIQRYNEHQMDLAQLKQFIRQKLSDKYNEVFSDVSKDGYAGYIDGKTNQEAFYKYLKGLLNKIEGSGYFLDKIEREDFLRKQRTFDNGSIPHQIHLQEMRAIIRRQAEFYPFLADNQDRIEKILTFRIPYYVGPLARGKSDFAWLSRKSADKITPWNFDEIVDKESSAEAFINRMTNYDLYLPNQKVLPKHSLLYEKFTVYNELTKVKYKTEQGKTAFFDANMKQEIFDGVFKVYRKVTKDKLMDFLEKEFDEFRIVDLTGLDKENKVFNASYGTYHDLCKILDKDFLDNSKNEKILEDIVLTLTLFEDREMIRKRLENYSDLLTKEQVKKLERRHYTGWGRLSAELIHGIRNKESRKTILDYLIDDGNSNRNFMQLINDDALSFKEEIAKAQVIGETDNLNQVVSDIAGSPAIKKGILQSLKIVDELVKIMGHQPENIVVEMARENQFTKQGRRNSQQRLKGLTDSIKEFGSQILKEHPVENSQLQNDRLFLYYLQNGRDMYTGEELDIDYLSQYDIDHIIPQAFIKDNSIDNRVLTSSKENRGKSDDVPSKDVVRKMKSYWSKLLSAKLITQRKFDNLTKAERGGLTDDDKAGFIKRQLVETRQITKHVARILDERFYTETDENNKKIRQVKIVTLKSNLVSNFRKEFELYKVREINDYHHAHDAYLNAVIGKALLGVYPQLEPEFVYGDYPHFHGHKENKATAKKFFYSNIMNFFKKDDVRTDKNGEIIWKKDEHISNIKKVLSYPQVNIVKKVEEQTGGFSKESILPKGNSDKLIPRKTKKFYWDTKKYGGFDSPIVAYSILVIADIEKGKSKKLKTVKALVGVTIMEKMTFERDPVAFLERKGYRNVQEENIIKLPKYSLFKLENGRKRLLASARELQKGNEIVLPNHLGTLLYHAKNIHKVDEPKHLDYVDKHKDEFKELLDVVSNFSKKYTLAEGNLEKIKELYAQNNGEDLKELASSFINLLTFTAIGAPATFKFFDKNIDRKRYTSTTEILNATLIHQSITGLYETRIDLSKLGGD

SEQ ID NO: 139 - protein, 1345 aa, Streptococcus mutans
MKKPYSIGLDIGTNSVGWAVVTDDYKVPAKKMKVLGNTDKSHIKKNLLGALLFDSGNTAADRRLKRTARRRYTRRRNRILYLQEIFAEEMSKVDDSFFHRLEDSFLVTEDKRGERHPIFGNLEEEVKYHENFPTIYHLRQYLADNPEKVDLRLVYLALAHIIKFRGHFLIEGKFDTRNNDVQRLFQEFLAVYDNTFENSSLQEQNVQVEEILTDKISKSAKKDRVLKLFPNEKSNGRFAEFLKLIVGNQADFKKHFELEEKAPLQFSKDTYEEELEVLLAQIGDNYAELFLSAKKLYDSILLSGILTVTDVSTKAPLSASMIQRYNEHQMDLAQLKQFIRQKLSDKYNEVFSDVSKDGYAGYIDGKTNQEAFYKYLKGLLNKIEGSGYFLDKIEREDFLRKQRTFDNGSIPHQIHLQEMRAIIRRQAEFYPFLADNQDRIEKILTFRIPYYVGPLARGKSDFAWLSRKSADKITPWNFDEIVDKESSAEAFINRMTNYDLYLPNQKVLPKHSLLYEKFTVYNELTKVKYKTEQGKTAFFDANMKQEIFDGVFKVYRKVTKDKLMDFLEKEFDEFRIVDLTGLDKENKAFNASYGTYHDLRKILDKDFLDNSKNEKILEDIVLTLTLFEDREMIRKRLENYSDLLTKEQVKKLERRHYTGWGRLSAELIHGIRNKESRKTILDYLIDDGNSNRNFMQLINDDALSFKEEIAKAQVIGETDNLNQVVSDIAGSPAIKKGILQSLKIVDELVKIMGHQPENIVVEMARENQFTNQGRRNSQQRLKGLTDSIKEFGSQILKEHPVENSQLQNDRLFLYYLQNGRDMYTGEELDIDYLSQYDIDHIIPQAFIKDNSIDNRVLTSSKENRGKSDDVPSKNVVRKMKSYWSKLLSAKLITQRKFDNLTKAERGGLTDDDKAGFIKRQLVETRQITKHVARILDERFHTETDENNKKIRQVKIVTLKSNLVSNFRKEFELYKVREINDYHHAHDAYLNAVIGKALLGVYPQLEPEFVYGDYPHFHGHKENKATAKKFFYSNIMNFFKKDDVRTDKNGEIIWKKDEHISNIKKVLSYPQVNIVKKVEEQTGGFSKESILPKGNSDKLIPRKTKKFYWDTKKYGGFDSPIVAYSILVIADIEKGKSKKLKTVKALVGVTIMEKMTFERDPVAFLERKGYRNVQEENIIKLPKYSLFKLENGRKRLLASARELQKGNEIVLPNHLGTLLYHAKNIHKVDEPKHLDYVDKHKDEFKELLDVVSNFSKKYTLAEGNLEKIKELYAQNNGEDLKELSSSFINLLTFTAIGAPAAFKFFDKNIDRKRYTSTTEILNATLIHQSITGLYETRIDLSKLGGD

SEQ ID NO: 140 - protein, 1355 aa, Streptococcus mutans
MKKPYSIGLDIGTNSVGWAVVTDDYKVPAKKMKVLGNTDKSHIKKNLLGALLFDSGNTAEDRRLKRTARRRYTRRRNRILYLQEIFAEEMSKVDDSFFHRLDESFLTDDDKNFDSHPIFGNKAEEDAYHQKFPTIYHLRKHLADSTEKADLRLVYLALAHMIKFRGHFLIEGELNAENTDVQKLFADFVGVYDRTFDDSHLSEITVDASSILTEKISKSRRLEKLINNYPKEKKNTLFGNLIALSLGLQPNFKTNFKLSEDAKLQFSKDTYEEDLEELLGKIGDDYADLFTLAKNLYDAILLSGILTADDSSTKAPLSASMIKRYAEHHEDLEKLKEFIKANKPELYHDIFKDETKNGYAGYIENGVKQDEFYKYLKNTLSKITGSDYFLDQIEREDFLRKQRTFDNGSIPHQIHLQEMHAILRRQGDYYPFLKENQDRIEKILTFRIPYYVGPLARKNSRFAWAEYHSDEAVTPWNFDQVIDKESSAQAFIEHMTNNDLYLPNEKVLPKHSPLYEKYTVYNELTKIKYVTEIGEAKFFDANLKQEIFDGLFKHERKVTKKKLRTFLDKNFDEFRIVDIQGLDKETETFNASYATYQDLLKVIKDKVFMDNPENAEILENIVLTLTLFEDREMIKQRLAKYADVFDKKVIDQLARRHYTGWGRLSAKLLNGIRDKQSCKTIMDYLIDDAQSNRNLMQLITDDNLTFKDDIVKAQYVDNSDDLHQVVQSLAGSPAIKKGILQSLKIVDELVKVMGKEPEQIVVEMARENQTTAKGRRNSQQRYKRLKEAIKSLDRDLNHKILKEHPTDNQALQNNRLFLYYLQNGRDMYTGESLDINRLSDYDIDHVIPQAFIKDNSIDNRVLTSSKANRGKSDDVPSEDVVNRMRPFWNKLLSSGLISQRKYNNLTKKELTLDDKAGFIKRQLVETRQITKHVARMLDERFNKEFDDNNKRIRRVKIVTLKSNLVSSFRKEFELYKVREINDYHHAHDAYLNAVVVKALLVKYPKLEPEFVYGEYPKYNSYRERKTATQKMFFYSNIMNMFKSKVKLADDQIVERPMIEVNDETGEIAWDKTKHITTVKKVLSYPQVNIVKKVEEQTIGQNGGLFDDNPKSPLEVIPSKLVPLKKALNPEKYGGYQKPTTAYPILLIVDTKQLIPISVMDKKRFEQNPVKFLKDKGYQQIEKNNFVKLPKYTLVDIGNGIKRLWASSKEVHKGNQLVVSKKSQDLLYHAHHLDNDYSNEYVKNHYQQFDILFNEITSFSKKCKLGKEHIQKIEEAYSKERDFASIEELADGFIKLLGFTQLGATSPFSFLGIKLNQKQYTGKKDYLLPCMEATLIHQSITGLYETRIDLSKLGGD

SEQ ID NO: 141 - protein, 1345 aa, Streptococcus mutans
MKKPYSIGLDIGTNSVGWSVVTDDYKVPAKKMKVLGNTDKSHIEKNLLGALLFDSGNTAEDRRLKRTARRRYTRRRNRILYLQEIFSEEMGKVDDSFFHRLEDSFLVTEDKRGERHPIFGNLEEEVKYHENFPTIYHLRQYLADNPEKVDLRLVYLALAHIIKFRGHFLIEGKFDTRNNDVQRLFQEFLAVYDNTFENSSLQEQNVQVEEILTDKISKSAKKDRVLKLFPNEKSNGRFAEFLKLIVGNQADFKKHFELEEKAPLQFSKDTYEEELEVLLAQIGDNYAELFLSAKKLYDSILLSGILTVTDVGTKAPLSASMIQRYNEHQMDLAQLKQFIRQKLSDKYNEVFSDVSKDGYAGYIDGKTNQEAFYKYLKGLLNKIEGSGYFLDKIEREDFLRKQRTFDNGSIPHQIHLQEMRAIIRRQAEFYPFLADNQDRIEKLLTFRIPYYVGPLARGKSDFAWLSRKSADKITPWNFDEIVDKESSAEAFINRMTNYDLYLPNQKVLPKHSLLYEKFTVYNELTKVKYKTEQGKTAFFDANMKQEIFDGVFKVYRKVTKDKLMDFLEKEFDEFRIVDLTGLDKENKVFNASYGTYHDLCKILDKDFLDNSKNEKILEDIVLTLTLFEDREMIRKRLENYSDLLTKEQVKKLERRHYTGWGRLSAELIHGIRNKESRKTILDYLIDDGNSNRNFMQLINDDALSFKEEIAKAQVIGETDNLNQVVSDIAGSPAIKKGILQSLKIVDELVKIMGHQPENIVVEMARENQFTNQGRRNSQQRLKGLTDSIKEFGSQILKEHPVENSQLQNDRLFLYYLQNGRDMYTGEELDIDYLSQYDIDHIIPQAFIKDNSIDNRVLTSSKENRGKSDDVPSKDVVRKMKSYWSKLLSAKLITQRKFDNLTKAERGGLTDDDKAGFIKRQLVETRQITKHVARILDERFNTETDENNKKIRQVKIVTLKSNLVSNFRKEFELYKVREINDYHHAHDAYLNAVIGKALLGVYPQLEPEFVYGDYPHFHGHKENKATAKKFFYSNIMNFFKKDDVRIDKNGEIIWKKDEHISNIKKVLSYPQVNIVKKVEEQTGGFSKESILPKGNSDKLIPRKTKKFYWDTKKYGGFDSPIVAYSILVIADIEKGKSKKLKTVKALVGVTIMEKMTFERDPVAFLERKGYRNVQEENIIKLPKYSLFKLENGRKRLLASARELQKGNEIVLPNHLGTLLYHAKNIHKVDEPKHLDYVDKHKDEFKELLDVVSNFSKKYTLAEGNLEKIKELYAQNNGEDLKELASSFINLLTFTAIGAPATFKFFDKNIDRKRYTSTTEILNATLIHQSITGLYETRIDLSKLGGD

SEQ ID NO: 142 - protein, 1345 aa, Streptococcus mutans
MKKPYSIGLDIGTNSVGWAVVTDDYKVPAKKMKVLGNTDKSHIKKNLLGALLFDSGNTAEDRRLKRTARRRYTRRRNRILYLQEIFSEEMGKVDDSFFHRLEDSFLVTEDKRGERHPIFGNLEEEVKYHENFPTIYHLRQYLADNPEKTDLRLVYLALAHIIKFRGHFLIEGKFDTRNNDVQRLFQEFLAVYDNTFENSSLQEQNVQVEEILTDKISKSAKKDRVLKLFPNEKSNGRFAEFLKLIVGNQADFKKHFELEEKAPLQFSKDIYEEELEVLLAQIGDNYAELFLSAKKLYDSILLSGILTVTDVSTKAPLSASMIQRYNEHQMDLAQLKQFIRQKLSDKYNEVFSDVSKDGYAGYIDGKTNQEAFYKYLKGLLNKIEGSGYFLDKIEREDFLRKQRTFDNGSIPHQIHLQEMRAIIRRQAEFYPFLADNQDRIEKILTFRIPYYVGPLARGKSDFAWLSRKSADKITPWNFDEIVDKESSVEAFINRMTNYDLYLPNQKVLPKHSLLYEKFTVYNELTKVKYKTEQGKTAFFDANMKQEIFDGVFKVYRKVTKDKLMDFLEKEFDEFRIVDLTGLDKENKAFNASYGTYHDLRKILDKDFLDNSKNEKILEDIVLTLTLFEDREMIRKRLKNYSDLLTKEQLKKLERRHYTGWGRLSAELIHGIRNKESRKTILDYLIDDGNSNRNFMQLINDDALSFKEEIAKAQVIGETDNLNQVVSDIAGSPAIKKGILQSLKIVDELVKIMGHQPENIVVEMARENQFTNQGRRNSQQRLKGLTDSIKEFGSQILKEHPVENSQLQNDRLFLYYLQNGRDMYTGEELDIDYLSQYDIDHIIPQAFIKDNSIDNRVLTSSKENRGKSDDVPSKNVVRKMKSYWSKLLSAKLITQRKFDNLTKAERGGLTDDDKAGFIKRQLVETRQITKHVARILDERFHTETDENNKKIRQVKIVTLKSNLVSNFRKEFELYKVREINDYHHAHDAYLNAVIGKALLGVYPQLEPEFVYGDYPHFHGHKENKATAKKFFYSNIMNFFKKDDVRTDKNGEIIWKKDEHISNIKKVLSYPQVNIVKKVEEQTGGFSKESILPKGNSDKLIPRKTKKFYWDTKKYGGFDSPIVAYSILVIADIEKGKSKKLKTVKALVGVTIMEKMTFERDPVAFLERKGYRNVQEENIIKLPKYSLFKLENGRKRLLASARELQKGNEIVLPNHLGTLLYHAKNIHKVDEPKHLDYVDKHKDEFKELLDVVSNFSKKYTLAEGNLEKIKELYAQNNGEDLKELASSFINLLTFTAIGAPATFKFFDKNIDRKRYTSTTEILNATLIHQSITGLYETRIDLSKLGGD

SEQ ID NO: 143 - protein, 1345 aa, Streptococcus mutans
MKKPYSIGLDIGTNSVGWAVVTDDYKVSAKKMKVLGNTDKSHIKKNLLGALLFDSGNTAEDRRLKRTARRRYTRRRNRILYLQEIFAEEMSKVDDSFFHRLEDSFLVTEDKRGERHPIFGNLEEEVKYHENFPTIYHLRQYLADNPEKVDLRLVYLALAHIIKFRGHFLIEGKFDTRNNDVQRLFQEFLAVYDNTFENSSLQEQNVQVEEILTDKISKSAKKDRVLKLFPNEKSNGRFAEFLKLIVGNQADFKKHFELEEKAPLQFSKDTYEEELEVLLAQIGDNYAELFLSAKKLYDSILLSGILTVTDVSTKAPLSASMIQRYNEHQMDLAQLKQFIRQKLSDKYNEVFSDVSKDGYAGYIDGKTNQEAFYKYLKGLLNKIEGSGYFLDKIEREDFLRKQRTFDNGSIPHQIHLQEMRAIIRRQAEFYPFLADNQDRIEKILTFRIPYYVGPLARGKSDFAWLSRKSADKITPWNFDEIVDKESSAEAFINRMTNYDLYLPNQKVLPKHSLLYEKFTVYNELTKVKYKTEQGKTAFFDANMKQEIFDGVFKVYRKVTKDKLMDFLEKEFDEFRIVDLTGLDKENKAFNASYGTYHDLRKILDKDFLDNSKNEKILEDIVLTLTLFEDREMIRKRLENYSDLLTKEQVKKLERRHYTGWGRLSAELIHGIRNKESRKTILDYLIDDGNSNRNFMQLINDDALSFKEEIAKAQVIGETDNLNQVVSDIAGSPAIKKGILQSLKIVDELVKIMGHQPENIVVEMARENQFTNQGRRNSQQRLKGLTDSIKEFGSQILKEHPVEHSQLQNDRLFLYYLQNGRDMYTGEELDIDYLSQYDIDHIIPQAFIKDNSIDNRVLTSSKENRGKSDDVPSKNVVRKMKSYWSKLLSAKLITQRKFDNLTKAERGGLTDDDKAGFIKRQLVETRQITKHVARILDERFHTETDENNKKIRQVKIVTLKSNLVSNFRKEFELYKVREINDYHHTHDAYLNAVIGKALLGVYPQLEPEFVYGDYPHFHGHKENKATAKKFFYSNIMNFFKKDDVRTDKNGEIIWKKDEHISNIKKVLSYPQVNIVKKVEEQTGGFSKESILPKGNSDKLIPRKTKKFYWDTKKYGGFDSPIVAYSILVIADIEKGKSKKLKTVKALVGVTIMEKMTFERDPVAFLERKGYRNVQEENIIKLPKYSLFKLENGRKRLLASARELQKGNEIVLPNHLGTLLYHAKNIHKVDEPKHLDYVDKHKDEFKELLDVVSNFSKKYTLAEGNLEKIKELYAQNNGEDLKELASSFINLLTFTAIGAPATFKFFDKNIDRKRYTSTTEILNATLIHQSITGLYETRIDLSKLGGD

SEQ ID NO: 144 - protein, 1345 aa, Streptococcus mutans
MKKPYSIGLDIGTNSVGWAVVTDDYKVPAKKMKVLGNTDKSHIKKNLLGALLFDSGNTAEDRRLKRTARRRYTRRRNRILYLQEIFSEEMGKVDDSFFHRLEDSFLVTEDKRGERHPIFGNLEEEVKYHENFPTIYHLRQYLADNPEKTDLRLVYLALAHIIKFRGHFLIEGKFDTRNNDVQRLFQEFLAVYDNTFENSSLQEQNVQVEEILTDKISKSAKKDRVLKLFPNEKSNGRFAEFLKLIVGNQADFKKHFELEEKAPLQFSKDIYEEELEVLLAQIGDNYAELFLSAKKLYDSILLSGILTVTDVSTKAPLSASMIQRYNEHQMDLAQLKQFIRQKLSDKYNEVFSDVSKDGYAGYIDGKTNQEAFYKYLKGLLNKIEGSGYFLDKIEREDFLRKQRTFDNGSIPHQIHLQEMRAIIRRQAEFYPFLADNQDRIEKILTFRIPYYVGPLARGKSDFAWLSRKSADKITPWNFDEIVDKESSVEAFINRMTNYDLYLPNQKVLPKHSLLYEKFTVYNELTKVKYKTEQGKTAFFDANMKQEIFDGVFKVYRKVTKDKLMDFLEKEFDEFRIVDLTGLDKENKAFNASYGTYHDLRKILDKDFLDNSKNEKILEDIVLTLTLFEDREMIRKRLKNYSDLLTKEQLKKLERRHYTGWGRLSAELIHGIRNKESRKTILDYLIDDGNSNRNFMQLINDDALSFKEEIAKAQVIGETDNLNQVVSDIAGSPAIKKGILQSLKIVDELVKIMGHQPENIVVEMARENQFTNQGRRNSQQRLKGLTDSIKEFGSQILKEHPVENSQLQNDRLFLYYLQNGRDMYTGEELDIDYLSQYDIDHIIPQAFIKDNSIDNRVLTSSKENRGKSDDVPSKDVVRKMKSYWSKLLSAKLITQRKFDNLTKAERGGLTDDDKAGFIKRQLVETRQITKHVARILDERFNTETDENNKKIRQVKIVTLKSNLVSNFRKEFELYKVREINDYHHAHDAYLNAVIGKALLGVYPQLEPEFVYGDYPHFHGHKENKATAKKFFYSNIMNFFKKDDVRTDKNGEIIWKKDEHISNIKKVLSYPQVNIVKKVEEQTGGFSKESILPKGNSYKLIPRKTKKFYWDTKKYGGFDSPIVAYSILVIADIEKGKSKKLKTVKALVGVTIMEKMTFERDPVAFLERKGYRNVQEENIIKLPKYSLFKLENGRKRLLASARELQKGNEIVLPNHLGTLLYHAKNIHKVDEPKHLDYVDKHKDEFKELLDVVSNFSKKYTLAEGNLEKIKELYAQNNGEDLKELASSFINLLTFTAIGAPAAFKFFDKNIDRKRYTSTTEILNATLIHQSITGLYETRIDLSKLGGD

SEQ ID NO: 145 - protein, 1345 aa, Streptococcus mutans
MKKPYSIGLDIGTNSVGWAVVTDDYKVPAKKMKVLGNTDKSHIKKNLLGALLFDSGNTAEDRRLKRTTRRRYTRRRNRILYLQEIFSEEMGKVDDSFFHRLEDSFLVTEDKRGERHPIFGNLEEEVKYHENFPTIYHLRQYLADNPEKTDLRLVYLALAHIIKFRGHFLIEGKFDTRNNDVQRLFQEFLAVYDNTFENSSLQEQNVQVEEILTDKISKSAKKDRVLKLFPNEKSNGCFAEFLKLIVGNQADFKKHFELEEKAPLQFSKDTYEEELEVLLAQIGDNYAELFLSAKKLYDSILLSGILTVTDVSTKAPLSASMIQRYNEHQMDLTQLKQFIRQKLSDKYNEVFSDVSKDGYAGYIDGKTNQEAFYKYLKGLLNKIEGSGYFLDKIEREDFLRKQRTFDNGSIPHQIHLQEMRAIIRRQAEFYPFLADNQDRIEKLLTFRIPYYVGPLASGKSDFAWLSRKSADKITPWNFDEIVDKESSAEAFINRMTNYDLYLPNQKVLPKHSLLYEKFTVYNELTKVKYKTEQGKTAFFDANMKQEIFDGVFKVYRKVTKDKLMDFLEKEFDEFRIVDLTGLDKENKVFNASYGTYHDLCKILDKDFLDNSKNEKILEDIVLTLTLFEDREMIRKRLENYSDLLTKEQVKKLERRHYTGWGRLSAELIHGIRNKESRKTILDYLIDDGNSNRNFMQLINDDALSFKEEIAKAQVIGETDNLNQVVSDIAGSPAIKKGILQSLKIVDELVKIMGHQPENIVVEMARENQFTNQGRRNSQQRLKGLTDSIKEFGSQILKEHPVENSQLQNDRLFLYYLQNGRDMYTGEELDIDYLSQYDIDHIIPQAFIKDNSIDNRVLTSSKENRGKSDDVPSKDVVRKMKSYWSKLLSAKLITQRKFDNLTKAERGGLTDDDKAGFIKRQLVETRQITKHVARILDERFNTETDENNKKIRQVKIVTLKSNLVSNFRKEFELYKVREINDYHHAHDAYLNAVIGKALLGVYPQLEPEFVYGDYPHFHGHKENKATAKKFFYSNIMNFFKKDDVRTDKNGEIIWKKDEHISNIKKVLSYPQVNIVKKVEEQTGGFSKESILPKGNSDKLIPRKTKKFYWDTKKYGGFDSPIVAYSILVIADIEKGKSKKLKTVKALVGVTIMEKMTFERDPVAFLERKGYRNVQEENIIKLPKYSLFKLENGRKRLLASARELQKGNEIVLPNHLGTLLYHAKNIHKVDEPKHLDYVDKHKDEFKELLDVVSNFSKKYTLAEGNLEKIKELYAQNNGEDLKELASSFINLLTFTAIGAPATFKFFDKNIDRKRYTSTTEILNATLIHQSITGLYETRIDLSKLGGD

SEQ ID NO: 146 - protein, 1345 aa, Streptococcus mutans
MKKPYSIGLDIGTNSVGWAVVTDDYKVPAKKMKVLGNTDKSHIKKNLLGALLFDSGNTAEDRRLKRTARRRYTRRRNRILYLQEIFSEEMGKVDDSFFHRLEDSFLVTEDKRGERHPIFGNLEEEVKYHENFPTIYHLRQYLADNPEKTDLRLVYLALAHIIKFRGHFLIEGKFDTRNNDVQRLFQEFLAVYDNTFENSSLQEQNVQVEEILTDKISKSAKKDRVLKLFPNEKSNGRFAEFLKLIVGNQADFKKHFELEEKAPLQFSKDIYEEELEVLLAQIGDNYAELFLSAKKLYDSILLSGILTVTDVSTKAPLSASMIQRYNEHQMDLAQLKQFIRQKLSDKYNEVFSDVSKDGYAGYIDGKTNQEAFYKYLKGLLNKIEGSGYFLDKIEREDFLRKQRTFDNGSIPHQIHLQEMRAIIRRQAEFYPFLADNQDRIEKILTFRIPYYVGPLARGKSDFAWLSRKSADKITPWNFDEIVDKESSAEAFINRMTNYDLYLPNQKVLPKHSLLYEKFTVYNELTKVKYKTEQGKTAFFDANMKQEIFDGVFKVYRKVTKDKLMDFLEKEFDEFRIVDLTGLDKENKAFNASYGTYHDLRKILDKDFLDNSKNEKILEDIVLTLTLFEDREMIRKRLKNYSDLLTKEQLKKLERRHYTGWGRLSAELIHGIRNKESRKTILDYLIDDGNSNRNFMQLINDDALSFKEEIAKAQVIGETDNLNQVVSDIAGSLAIKKGILQSLKIVDELVKIMGHQPENIVVEMARENQFTNQGRRNSQQRLKGLTDSIKEFGSQILKEHPVENSQLQNDRLFLYYLQNGRDMYTGEELDIDYLSQYDIDHIIPQAFIKDNSIDNRVLTSSKENRGKSDDVPSKDVVRKMKSYWSKLLSAKLITQRKFDNLTKGERGGLTDDDKAGFIKRQLVETRQITKHVARILDERFNTETDENNKKIRQVKIVTLKSNLVSNFRKEFELYKVREINDYHHAHDAYLNAVIGKALLGVYPQLEPEFVYGDYPHFHGHKENKATAKKFFYSNIMNFFKKDDVRTDKNGEIIWKKDEYISNIKKVLSYPQVNIVKKVEEQTGGFFKESILPKGDSDKLIPRKTKKFYWDTKKYGGFDSPIVAYSILVIADIEKGKSKKLKTVKALVGVTIMEKMTFERDPVAFLERKGYRNVQEENIIKLPKYSLFKLENGRKRLLASARELQKGNEIVLPNHLGTLLYHAKNIHKVDEPKHLDYVDKHKDEFKELLDVVSNFSKKYTLAEGNLEKIKELYAQNNGEDLKELASSFINLLTFTAIGAPATFKFFDKNIDRKRYTSTTEILNATLIHQSITGLYETRIDLSKLGGD

SEQ ID NO: 147 - protein, 1345 aa, Streptococcus mutans
MKKPYSIGLDIGTNSVGWAVVTDDYKVPAKKMKVLGNTDKSHIKKNLLGALLFDSGNTAEDRRLKRTARRRYTRRRNRILYLQEIFSEEMGKVNDSFFHRLEDSFLVTEDKRGERHPIFGNLEEEVKYHENFPTIYHLRQYLADNPEKVDLRLVYLALAHIIKFRGHFLIEGKFDTRNNDVQRLFQEFLAVYDNTFENSSLQEQNVQVEEILTDKISKSAKKDRVLKLFPNEKSNGRFAEFLKLIVGNQADFKKHFELEEKAPLQFSKDTYEEELEVLLAQIGDNYAELFLSAKKLYDSILLSGILTVTDVSTKAPLSASMIQRYNEHQMDLAQLKQFIRQKLSDKYNEVFSDVSKDGYAGYIDGKTNQEAFYKYLKGLLNKIEGSGYFLDKIEREDFLRKQRTFDNGSIPHQIHLQEMRAIIRRQAEFYPFLADNQDRIEKILTFRIPYYVGPLARGKSDFAWLSRKSADKITPWNFDEIVDKESSAEAFINRMTNYDLYLPNQKVLPKHSLLYEKFTVYNELTKVKYKTEQGKTAFFDANMKQEIFDGVFKVYRKVTKDKLMDFLEKEFDEFRIVDLTGLDKENKVFNASYGTYHDLCKILDKDFLDNSKNEKILEDIVLTLTLFEDREMIRKRLENYSDLLTKEQVKKLERRHYTGWGRLSAELIHGIRNKESRKTILDYLIDDGNSNRNFMQLINDDALSFKEEIAKAQVIGETDNLNQVVSDIAGSPAIKKGILQSLKIVDELVKIMGHQPENIVVEMARENQFTKQGRRNSQQRLKGLTDSIKEFGSQILKEHPVENSQLQNDRLFLYYLQNGRDMYTGEELDIDYLSQYDIDHIIPQAFIKDNSIDNRVLTSSKENRGKSDDVPSKDVVRKMKSYWSKLLSAKLITQRKFDNLTKAERGGLTDDDKAGFIKRQLVETRQITKHVARILDERFYTETDENNKKIRQVKIVTLKSNLVSNFRKEFELYKVREINDYHHAHDAYLNAVIGKALLGVYPQLEPEFVYGDYPHFHGHKENKATAKKFFYSNIMNFFKKDDVRTDKNGEIIWKKDEYISNIKKVLSYPQVNIVKKVEEQTGGFSKESILPKGNSDKLIPRKTKKFYWDTKKYGGFDSPIVAYSILVIADIEKGKSKKLKTVKALVGVTIMEKMTFERDPIAFLERKGYRNVQEENIIKLPKYSLFKLENGRKRLLASARELQKGNEIVLPNHLGTLLYHAKNIHKVDEPKHLDYVDKHKDEFKELLDVVSNFSKKYTLAEGNLEKIKELYAQNNGEDLKELASSFINLLTFTAIGAPAAFKFFDKNIDRKRYTSTTEILNATLIHQSITGLYETRIDLSKLGGD

SEQ ID NO: 148 - protein, 1345 aa, Streptococcus mutans
MKKPYSIGLDIGTNSVGWAVVTDDYKVPAKKMKVLGNTDKSHIKKNLLGALLFDSGNTAEDRRLKRTARRRYTRRRNRILYLQEIFSEEMGKVDDSFFHRLEDSFLVTEDKRGERHPIFGNLEEEVKYHENFPTIYHLRQYLADNPEKTDLRLVYLALAHIIKFGGHFLIEGKFDTRNNDVQRLFQEFLAVYDNTFENSSLQEQNVQVEEILTDKISKSAKKDRVLKLFPNEKSNGRFAEFLKLIVGNQADFKKHFELEEKAPLQFSKDIYEEELEVLLAQIGDNYAELFLSAKKLYDSILLSGILTVTDVSTKAPLSASMIQRYNEHQMDLAQLKQFIRQKLSDKYNEVFSDVSKDGYAGYIDGKTNQEAFYKYLKGLLNKIEGSGYFLDKIEREDFLRKQRTFDNGSIPHQIHLQEMRAIIRRQAEFYPFLADNQDRIEKILTFRIPYYVGPLARGKSDFAWLSRKSADKITPWNFDEIVDKESSVEAFINRMTNYDLYLPNQKVLPKHSLLYEKFTVYNELTKVKYKTEQGKTAFFDANMKQEIFDGVFKVYRKVTKDKLMDFLEKEFDEFRIVDLTGLDKENKAFNASYGTYHDLRKILDKDFLDNSKNEKILEDIVLTLTLFEDREMIRKRLKNYSDLLTKEQLKKLERRHYTGWGRLSAELIHGIRNKESRKTILDYLIDDGNSNRNFMQLINDDALSFKEEIAKAQVIGETDNLNQVVSDIAGSPAIKKGILQSLKIVDELVKIMGHQPENIVVEMARENQFTNQGRRNSQQRLKGLTDSIKEFGSQILKEHPVENSQLQNDRLFLYYLQNGRDMYTGEELDIDYLSQYDIDHIIPQAFIKDNSIDNRVLTSSKENRGKSDDVPSKNVVRKMKSYWSKLLSAKLITQRKFDNLTKAERGGLTDDDKAGFIKRQLVETRQITKHVARILDERFHTETDENNKKIRQVKIVTLKSNLVSNFRKEFELYKVREINDYHHAHDAYLNAVIGKALLGVYPQLEPEFVYGDYPHFHGHKENKATAKKFFYSNIMNFFKKDDVRTDKNGEIIWKKDEHISNIKKVLSYPQVNIVKKVEEQTGGFSKESILPKGNSDKLIPRKTKKFYWDTKKYGGFDSPIVAYSILVIADIEKGKSKKLKTVKALVGVTIMEKMTFERDPVAFLERKGYRNVQEENIIKLPKYSLFKLENGRKRLLASARELQKGNEIVLPNHLGTLLYHAKNIHKVDEPKHLDYVDKHKDEFKELLDVVSNFSKKYTLAEGNLEKIKELYAQNNGEDLKELASSFINLLTFTAIGAPATFKFFDKNIDRKRYTSTTEILNATLIHQSITGLYETRIDLSKLGGD

SEQ ID NO: 149 - protein, 1359 aa, Streptococcus mutans
MKKPYSIGLDIGTNSVGWAVVTDDYKVPAKKMKVLGNTDKSHIKKNLLGALLFDSGNTAEDRRLKRTARRRYTRRRNRILYLQEIFAEEMMQVDESFFQRLDDSFLVEEDKRGSRYPIFGTLKEEKKYHKEFKTIYHLREKLANSTEKADLRLVYLSLAHMIKFRGHFLIEGQLKAENTNVQALFKDFVEVYDKTVEESHLSEMTVDALSILTEKVSKSRRLENLVECYPTEKKNTLFGNLIALSLGLQPNFKTNFQLSEDAKLQFSKDTYEEDLEGLLGEIGDEYADLFASAKNLYDAILLSGILAVDDNTTKAPLSASMVKRYKEHKEELAAFKRFIKEKLPKKYEEIFKDDTKNGYAGYVGADKKLRKRSGKLATEEEFYKYVKGILNKVEGADVWLDKIDREDFLRKQRTFDNGSIPHQIHLQEMHAILRRQGEHYPFLKENQDKIEKILTFRIPYYVGPLVRKGSRFAWAEYKADEKITPWNFDDILDKEKSAEKFITRMTLNDLYLPEEKVLPKHSLLYETFTVYNELTKVKYVNEQGEAKFFDANMKQEIFDHVFKENRKVTKDKLLNYLNKEFEEFRIVNLTGLDKENKVFNSSLGTYHDLRKILNKSFLDNKENEQIIEDIIQTLTLFEDREMIRQRLQKYSDIFTKAQLKKLERRHYTGWGRLSYKLINGIRDKQSNKTILGYLIDDGYSNRNFMQLINDDALSFKEEIAKAQVIGEMDGLNQVVSDIAGSPAIKKGILQSLKIVDELVKVMGHNPANIVIEMARENQTTAKGRRSSQKRYKRLEEAIKNLDHDLNHKILKEHPTDNQALQNDRLFLYYLQNGRDMYTEDPLDINRLSDYDIDHIIPQAFIKDNSIDNRVLTRSDKNRGKSDDVPSEEVVHKMKPFWSKLLSAKLITQRKFDNLTKAERGGLTDDDKAGFIKRQLVETRQITKHVARILDERFNTETDENNKKIRQVKIVTLKSNLVSNFRKEFELYKVREINDYHHAHDAYLNAVIGKALLGVYPQLEPEFVYGDYPHFHGHKENKATAKKFFYSNIMNFFKKGDVRTDKNGEIIWKKDEHISNIKKVLSYPQVNIVKKVEEQTGGFSKESILPKGNSDKLIPRKTKKFYWDTKKYGGFDSPIVAYSILVIADIEKGKSKKLKTVKALVGVTIMEKMTFERDPVAFLERKGYRNVQEENIIKLPKYSLFKLENGRKRLLASARELQKGNEIVLPNHLETLLYHAKNIHKVDEPKHLDYVDKHKDEFKELLDVVSNFSKKYTLAEGNLEKIKELYAQNNGEDLKELASSFINLLTFTAIGAPAAFKFFDKNIDRKRYTSTTEILNATLIHQSITGLYETRIDLNKLGGD

SEQ ID NO: 150 - protein, 1345 aa, Streptococcus mutans
MKKPYSIGLDIGTNSVGWAVVTDDYKVPAKKMKVLGNTDKSHIKKNLLGALLFDSGNTAEDRRLKRTARRRYTRRRNRILYLQEIFSEEMDKVDDSFFHRLEDSFLVTEDKRGERHPIFGNLEEEVKYHENFPTIYHLRQYLADNPEKVDLRLVYLALAHIIKFRGHFLIEGKFDTRNNDVQRLFQEFLAVYDNTFENSSLQEQNVQVEEILTDKISKSAKKDRVLKLFPNEKSNGRFAEFLKLIVGNQADFKKHFELEEKAPLQFSKDTYEEELEVLLAQIGDNYAELFLSAKKLYDSILLSGILTVTDVSTKAPLSASMIQRYNEHQMDLAQLKQFIRQKLSDKYNEVFSDVSKDGYAGYIDGKTNQEAFYKYLKGLLNKIEGSGYFLDKIEREDFLRKQRTFDNGSIPHQIHLQEMRAIIRRQAEFYPFLADNQDRIEKILTFRIPYYVGPLARGKSDFAWLSRKSADKITPWNFDEIVDKESSAEAFINRMTNYDLYLPNQKVLPKHSLLYEKFTVYNELTKVKYKTEQGKTAFFDANMKQEIFDGVFKVYRKVTKDKLMDFLEKEFDEFRIVDLTGLDKENKVFNASYGTYHDLCKILDKDFLDNSKNEKILEDIVLTLTLFEDREMIRKRLENYSDLLTKEQVKKLERRHYTGWGRLSAELIHGIRNKESRKTILDYLIDDGNSNRNFMQLINDDALSFKEEIAKAQVIGETDNLNQVVSDIAGSPAIKKGILQSLKIVDELVKIMGHQPENIVVEMARENQFTKQGRRNSQQRLKGLTDSIKEFGSQILKEHPVENSQLQNDRLFLYYLQNGRDMYTGEELDIDYLSQYDIDHIIPQAFIKDNSIDNRVLTSSKENRGKSDDVPSKDVVRKMKSYWSKLLSAKLITQRKFDNLTKAERGGLTDDDKAGFIKRQLVETRQITKHVARILDERFYTETDENNKKIRQVKIVTLKSNLVSNFRKEFELYKVREINDYHHAHDAYLNAVIGKALLGVYPQLEPEFVYGDYPHFHGHKENKATAKKFFYSNIMNFFKKDDVRTDKNGEIIWKKDEHISNIKKVLSYPQVNIVKKVEEQTGGFSKESILPKGNSDKLIPRKTKKFYWDTKKYGGFDSPIVAYSILVIADIEKGKSKKLKTVKALVGVTIMEKMTFERDPVAFLERKGYRNVQEENIIKLPKYSLFKLENGRKRLLASARELQKGNEIVLPNHLGTLLYHAKNIHKVDEPKHLDYVDKHKDEFKELLDVVSNFSKKYTLAEGNLEKIKELYAQNNGEDLKELASSFINLLTFTAIGAPATFKFFDKNIDRKRYTSTTEILNATLIHQSITGLYETRIDLSKLGGD

SEQ ID NO: 151 - protein, 1345 aa, Streptococcus mutans
MKKPYSIGLDIGTNSVGWAVVTDDYKVPAKKMKVLGNTDKSHIKKNLLGALLFDSGNTAEDRRLKRTARRRYTRRRNRILYLQEIFSEEMGKVDDSFFHRLEDSFLVTEDKRGERHPIFGNLEEEVKYHENFPTIYHLRQYLADNPEKVDLRLVYLALAHIIKFRGHFLIEGKFDTRNNDVQKLFQEFLAVYDNTFENSSLQEQNVQVEEILTDKISKSAKKDRVLKLFPNEKSNGRFAEFLKLIVGNQADFKKHFELEEKAPLQLSKDTYEEELEVLLAQIGDNYAELFLSAKKLYDSILLSGILTVTDVSTKAPLSASMIQRYNEHQMDLAQLKQFIRQKLSDKYNEVFSDVSKDGYAGYIDGKTNQEAFYKYLKGLLNKIEGSGYFLDKIEREDFLRKQRTFDNGSIPHQIHLQEMRAIIRRQAEFYPFLADNQDRIEKILTFRIPYYVGPLARGKSDFAWLSRKSADKITPWNFDEIVDKESSVEAFINRMTNYDLYLPNQKVLPKHSLLYEKFTVYNELTKVKYKTEQGKTAFFDANMKQEIFDGVFKVYRKVTKDKLMDFLEKEFDEFRIVDLTGLDKENKAFNASYGTYHDLRKILDKDFLDNSKNEKILEDIVLTLTLFEDREMIRKRLENYSDLLTKEQVKKLERRHYTGWGRLSAELIHGIRNKESRKTLLDYLIDDGNSNRNFMQLINDDALSFKEEIAKAQVIGETDNLNQVVSDIAGSPAIKKGILQSLKIVDELVKIMGHQPENIVVEMARENQFTNQGRRNSQQRLKGLTDSIKEFGSQILKEHPVENSQLQNDRLFLYYLQNGRDMYTGEELDIDYLSQYDIDHIIPQAFIKDNSIDNRVLTSSKENRGKSDDVPSKDVVRKMKSYWSKLLSAKLITQRKFDNLTKAERGGLTDDDKAGFIKRQLVETRQITKHVARILDERFNTETDENNKKIRQVKIVTLKSNLVSNFRKEFELYKVREINDYHHAHDAYLNAVIGKALLGVYPQLEPEFVYGDYPHFHGHKENKATAKKFFYSNIMNFFKKDDVRTDKNGEIIWKKDEYISNIKKVLSYPQVNIVKKVEEQTGGFSKESILPKGNSDKLIPRKTKKFYWDTKKYGGFDSPIVAYSILVIADIEKGKSKKLKTVKALVGVTIMEKMTFERDPIAFLERKGYRNVQEENIIKLPKYSLFKLENGRKRLLASARELQKGNEIVLPNHLGTLLYHAKNIHKVDEPKHLDYVDKHKDEFKELLDVVSNFSKKYTLAEGNLEKIKELYAQNNGEDLKELASSFINLLTFTAIGAPATFKFFDKNIDRKRYTSTTEILNATLIHQSITGLYETRIDLSKLGGD

SEQ ID NO: 152 - protein, 1345 aa, Streptococcus mutans
MKKPYSIGLDIGTNSVGWAVVTDDYKVPAKKMKVLGNTDKSHIKKNLLGALLFDSGNTAEDRRLKRTARRRYTRRRNRILYLQEIFSEEMGKVDDSFFHRLEDSFLVTEDKRGERHPIFGNLEEEVKYHENFPTIYHLRQYLADNPEKTDLRLVYLALAHIIKFRGHFLIEGKFDTRNNDVQRLFQEFLAVYDNTFENSSLQEQNVQVEEILTDKISKSAKKDRVLKLFPNEKSNGRFAEFLKLIVGNQADFKKHFELEEKAPLQFSKDIYEEELEVLLAQIGDNYAELFLSAKKLYDSILLSGILTVTDVSTKAPLSASMIQRYNEHQMDLAQLKQFIRQKLSDKYNEVFSDVSKDGYAGYIDGKTNQEAFYKYLKGLLNKIEGSGYFLDKIEREDFLRKQRTFDNGSIPHQIHLQEMRAIIRRQAEFYPFLADNQDRIEKILTFRIPYYVGPLARGKSDFAWLSRKSADKITPWNFDEIVDKESSAEAFINRMTNYDLYLPNQKVLPKHSLLYEKFTVYNELTKVKYKTEQGKTAFFDANMKQEIFDGVFKVYRKVTKDKLMDFLEKEFDEFRIVDLTGLDKENKAFNASYGTYHDLRKILDKDFLDNSKNEKILEDIVLTLTLFEDREMIRKRLKNYSDLLTKEQLKKLERRHYTGWGRLSAELIHGIRNKESRKTILDYLIDDGNSNRNFMQLINDDALSFKEEIAKAQVIGETDNLNQVVSDIAGSLAIKKGILQSLKIVDELVKIMGHQPENIVVEMARENQFTNQGRRNSQQRLKGLTDSIKEFGSQILKEHPVENSQLQNDRLFLYYLQNGRDMYTGEELDIDYLSQYDIDHIIPQAFIKDNSIDNRVLTSSKENRGKSDDVPSKDVVRKMKSYWSKLLSAKLITQRKFDNLTKGERGGLTDDDKAGFIKHQLVETRQITKHVARILDERFNTETDENNKKIRQVKIVTLKSNLVSNFRKEFELYKVREINDYHHAHDAYLNAVIGKALLGVYPQLEPEFVYGDYPHFHGHKENKATAKKFFYSNIMNFFKKDDVRTDKNGEIIWKKDEYISNIKKVLSYPQVNIVKKVEEQTGGFFKESILPKGDSDKLIPRKTKKFYWDTKKYGGFDSPIVAYSILVIADIEKGKSKKLKTVKALVGVTIMEKMTFERDPVAFLERKGYRNVQEENIIKLPKYSLFKLENGRKRLLASARELQKGNEIVLPNHLGTLLYHAKNIHKVDEPKHLDYVDKHKDEFKELLDVVSNFSKKYTLAEGNLEKIKELYAQNNGEDLKELASSFINLLTFTAIGAPATFKFFDKNIDRKRYTSTTEILNATLIHQSITGLYETRIDLSKLGGD

SEQ ID NO: 153 - protein, 1345 aa, Streptococcus mutans
MKKPYSIGLDIGTNSVGWAVVTDDYKVPAKKMKVLGNTDKSHIKKNLLGALLFDSGNTAEDRRLKRTARRRYTRRRNRILYLQEIFSEEMGKVDDSFFHRLEDSFLVTEDKRGERHPIFGNLEEEVKYHENFPTIYHLRQYLADNPEKTDLRLVYLALAHIIKFRGHFLIEGKFDTRNNDVQRLFQEFLAVYDNTFENSSLQEQNVQVEEILTDKISKSAKKDRVLKLFPNEKSNGRFAEFLKLIVGNQADFKKHFELEEKAPLQFSKDIYEEELEVLLAQIGDNYAELFLSAKKLYDSILLSGILTVTDVSTKAPLSASMIQRYNEHQMDLAQLKQFIRQKLSDKYNEVFSDVSKDGYAGYIDGKTNQEAFYKYLKGLLNKIEGSGYFLDKIEREDFLRKQRTFDNGSIPHQIHLQEMRAIIRRQAEFYPFLADNQDRIEKILTFRIPYYVGPLARGKSDFAWLSRKSADKITPWNFDEIVDKESSAEAFINRMTNYDLYLPNQKVLPKHSLLYEKFTVYNELTKVKYKTEQGKTAFFDANMKQEIFDGVFKVYRKVTKDKLMDFLEKEFDEFRIVDLTGLDKENKAFNASYGTYHDLRKILDKDFLDNSKNEKILEDIVLTLTLFEDREMIRKRLENYSDLLTKEQVKKLERRHYTGWGRLSAELIHGIRNKESRKTLLDYLIDDGNSNRNFMQLINDDALSFKEEIAKAQVIGETDNLNQVVSDIAGSPAIKKGILQSLKIVDELVKIMGHQPENIVVEMARENQFTNQGQRNSQQRLKGLTDSIKEFGSQILKEHPVENSQLQNDRLFLYYLQNGRDMYTGEELDIDYLSQYDIDHIIPQAFIKDNSIDNRVLTSSKENRGKSDDVPSKDVVRKMKSYWSKLLSAKLITQRKFDNLTKAERGGLTDDDKAGFIKRQLVETRQITKHVARILDERFNTETDENNKKIRQVKIVTLKSNLVSNFRKEFELYKVREINDYHHAHDAYLNAVIGKALLGVYPQLEPEFVYGDYPHFHGHKENKATAKKFFYSNIMNFFKKDDVRTDKNGEIIWKKDEYISNIKKVLSYPQVNIVKKVEEQTGGFSKESILPKGDSDKLIPRKTKKFYWDTKKYGGFDSPIVAYSILVIADIEKGKSKKLKTVKALVGVTIMEKMTFERDPVAFLERKGYRNVQEENIIKLPKYSLFKLENGRKRLLASARELQKGNEIVLPDHLGTLLYHAKNIHKVDEPKHLDYVDKHKDEFKELLDVVSNFSKKYTLAEGNLEKIKELYAQNNGEDLKELASSFINLLTFTAIGAPATFKFFDKNIDRKRYTSTTEILNATLIHQSITGLYETRIDLSKLGGD

SEQ ID NO: 154 - protein, 1345 aa, Streptococcus mutans
MKKPYSIGLDIGTNSVGWAVVTDDYKVPAKKMKVLGNTDKSHIKKNLLGALLFDSGNTAADRRLKRTARRRYTRRRNRILYLQEIFAEEMSKVDDSFFHRLEDSFLVTEDKRGERHPIFGNLEEEVKYHENFPTIYHLRQYLADNPEKVDLRLVYLALAHIIKFRGHFLIEGKFDTRNNDVQRLFQEFLAVYDNTFENSSLQEQNVQVEEILTDKISKSAKKDRVLKLFPNEKSNGRFAEFLKLIVGNQADFKKHFELEEKAPLQFSKDTYEEELEVLLAQIGDNYAELFLSAKKLYDSILLSGILTVTDVSTKAPLSASMIQRYNEHQMDLAQLKQFIRQKLSDKYNEVFSDVSKDGYAGYIDGKTNQEAFYKYLKGLLNKIEGSGYFLDKIEREDFLRKQRTFDNGSIPHQIHLQEMRAIIRRQAEFYPFLADNQDRIEKILTFRIPYYVGPLARGKSDFAWLSRKSADKITPWNFDEIVDKESSAEAFINRMTNYDLYLPNQKVLPKHSLLYEKFTVYNELTKVKYKTEQGKTAFFDANMKQEIFDGVFKVYRKVTKDKLMDFLEKEFDEFRIVDLTGLDKENKAFNASYGTYHDLRKILDKDFLDNSKNEKILEDIVLTLTLFEDREMIRKRLENYSDLLTKEQVKKLERRHYTGWGRLSAELIHGIRNKESRKTILDYLIDDGNSNRNFMQLINDDALSFKEEIAKAQVIGETDNLNQVVSDIAGSPAIKKGILQSLKIVDELVKIMGHQPENIVVEMARENQFTNQGRRNSQQRLKGLTDSIKEFGSQILKEHPVKHSQLQNDRLFLYYLQNGRDMYTGEELDIDYLSQYDIDHIIPQAFIKDNSIDNRVLTSSKENRGKSDDVPSKNVVRKMKSYWSKLLSAKLITQRKFDNLTKAERGGLTDDDKAGFIKRQLVETRQITKHVARILDERFHTETDENNKKIRQVKIVTLKSNLVSNFRKEFELYKVREINDYHHAHDAYLNAVIGKALLGVYPQLEPEFVYGDYPHFHGHKENKATAKKFFYSNIMNFFKKDDVRTDKNGEIIWKKDEHISNIKKVLSYPQVNIVKKVEEQTGGFSKESILPKGNSDKLIPRKTKKFYWDTKKYGGFDSPIVAYSILVIADIEKGKSKKLKTVKALVGVTIMEKMTFERDPVAFLERKGYRNVQEENIIKLPKYSLFKLENGRKRLLASARELQKGNEIVLPNHLGTLLYHAKNIHKVDEPKHLDYVDKHKDEFKELLDVVSNFSKKYTLAEGNLEKIKELYAQNNGEDLKELASSFINLLTFTAIGAPATFKFFDKNIDRKRYTSTTEILNATLIHQSITGLYETRIDLSKLGGD

SEQ ID NO: 155 - protein, 1345 aa, Streptococcus mutans
MKKPYSIGLDIGTNSVGWAVVTDDYKVPDKKMKVLGNTDKSHIKKNLLGALLFDSGNTAEDRRLKRTARRRYTRRRNRILYLQEIFSEEMGKVDDSFFHRLEDSFLVTEDKRGERHPIFGNLEEEVKYHENFPTIYHLRQYLADNPEKTDLRLVYLALAHIIKFRGHFLIEGKFDTRNNDVQRLFQEFLAVYDNTFENSSLQEQNVQVEEILTDKISKSAKKDRVLKLFPNEKSNGRFAEFLKLIVGNQADFKKHFELEEKAPLQFSKDIYEEELEVLLAQIGDNYAELFLSAKKLYDSILLSGILTVTDVSTKAPLSASMIQRYNEHQMDLAQLKQFIRQKLSDKYNEVFSDVSKDGYAGYIDGKTNQEAFYKYLKGLLNKIEGSGYFLDKIEREDFLRKQRTFDNGSIPHQIHLQEMRAIIRRQAEFYPFLADNQDRIEKILTFRIPYYVGPLARGKSDFAWLSRKSADKITPWNFDEIVDKESSVEAFINRMTNYDLYLPNQKVLPKHSLLYEKFTVYNELTKVKYKTEQGKTAFFDANMKQEIFDGVFKVYRKVTKDKLMDFLEKEFDEFRIVDLTGLDKENKAFNASYGTYHDLRKILDKDFLDNSKNEKILEDIVLTLTLFEDREMIRKRLKNYSDLLTKEQLKKLERRHYTGWGRLSAELIHGIRNKESRKTILDYLIDDGNSNRNFMQLINDDALSFKEEIAKAQVIGETDNLNQVVSDIAGSPAIKKGILQSLKIVDELVKIMGHQPENIVVEMARENQFTNQGRRNSQQRLKGLTDSIKEFGSQILKEHPVENSQLQNDRLFLYYLQNGRDMYTGEELDIDYLSQYDIDHIIPQAFIKDNSIDNRVLTSSKENRGKSDDVPSKDVVRKMKSYWSKLLSAKLITQRKFDNLTKAERGGLTDDDKAGFIKRQLVETRQITKHVARILDERFYTETDENNKKIRQVKIVTLKSNLVSNFRKEFELYKVREINDYHHAHDAYLNAVIGKALLGVYPQLEPEFVYGDYPHFHGHKENKATAKKFFYSNIMNFFKKDDVRTDKNGEIIWKKDEHISNIKKVLSYPQVNIVKKVEEQTGGFSKESILPKGNSDKLIPRKTKKFYWDTKKYGGFDSPIVAYSILVIADIEKGKSKKLKTVKALVGVTIMEKMTFERDPVAFLERKGYRNVQEENIIKLPKYSLFKLENGRKRLLASARELQKGNEIVLPNHLGTLLYHAKNIHKVDEPKHLDYVDKHKDEFKELLDVVSNFSKKYTLAEGNLEKIKELYAQNNGEDLKELASSFINLLTFTAIGAPATFKFFDKNIDRKRYTSTTEILNATLIHQSITGLYETRIDLSKLGGD

SEQ ID NO: 156 - protein, 1345 aa, Streptococcus mutans
MKKPYSIGLDIGTNSVGWAVVTDDYKVPAKKMKVLGNTDKSHIKKNLLGALLFDSGNTAADRRLKRTARRRYTRRRNRILYLQEIFAEEMSKVDDSFFHRLEDSFLVTEDKRGERHPIFGNLEEEVKYHENFPTIYHLRQYLADNPEKVDLRLVYLALAHIIKFRGHFLIEGKFDTRNNDVQRLFQEFLAVYDNTFENSSLQEQNVQVEEILTDKISKSAKKDRVLKLFPNEKSNGRFAEFLKLIVGNQADFKKHFELEEKAPLQFSKDTYEEELEVLLAQIGDNYAELFLSAKKLYDSILLSGILTVTDVSTKAPLSASMIQRYNEHQMDLAQLKQFIRQKLSDKYNEVFSDVSKDGYAGYIDGKTNQEAFYKYLKGLLNKIEGSGYFLDKIEREDFLRKQRTFDNGSIPHQIHLQEMRAIIRRQAEFYPFLADNQDRIEKILTFRIPYYVGPLARGKSDFAWLSRKSADKITPWNFDEIVDKESSAEAFINRMTNYDLYLPNQKVLPKHSLLYEKFTVYNELTKVKYKTEQGKTAFFDANMKQEIFDGVFKVYRKVTKDKLMDFLEKEFDEFRIVDLTGLDKENKAFNASYGTYHDLRKILDKDFLDNSKNEKILEDIVLTLTLFEDREMIRKRLENYSDLLTKEQVKKLERRHYTGWGRLSAELIHGIRNKESRKTILDYLIDDGNSNRNFMQLINDDALSFKEEIAKAQVIGETDNLNQVVSDIAGSPAIKKGILQSLKIVDELVKIMGHQPENIVVEMARENQFTNQGRRNSQQRLKGLTDSIKEFGSQILKEHPVENSQLQNDRLFLYYLQNGRDMYTGEELDIDYLSQYDIDHIIPQAFIKDNSIDNRVLTSSKENRGKSDDVPSKNVVRKMKSYWSKLLSAKLITQRKFDNLTKAERGGLTDDDKAGFIKRQLVETRQITKHVARILDERFHTETDENNKKIRQVKIVTLKSNLVSNFRKEFELYKVREINDYHHAHDAYLNAVIGKALLGVYPQLEPEFVYGDYPHFHGHKENKATAKKFFYSNIMNFFKKDDVRTDKNGEIIWKKDEHISNIKKVLSYPQVNIVKKVEEQTGGFSKESILPKGNSDKLIPRKTKKFYWDTKKYGGFDSPIVAYSILVIADIEKGKSKKLKTVKALVGVTIMEKMTFERDPVAFLERKGYRNVQEENIIKLPKYSLFKLENGRKRLLASARELQKGNEIVLPNHLGTLLYHAKNIHKVDEPKHLDYVDKHKDEFKELLDVVSNFSKKYTLAEGNLEKIKELYAQNNGEDLKELASSFINLLTFTAIGAPATFKFFDKNIDRKRYTSTTEILNATLIHQSITGLYETRIDLSKLGGD

SEQ ID NO: 157 - protein, 1345 aa, Streptococcus mutans
MKKPYSIGLDIGTNSVGWAVVTDDYKVPAKKMKVLGNTDKSHIEKNLLGALLFDSGNTAEDRRLKRTARRRYTRRRNRILYLQEIFSEEMGKVDDSFFHRLEDSFLVTEDKRGERHPIFGNLEEEVKYHENFPTIYHLRQYLADNPEKVDLRLVYLALAHIIKFRGHFLIEGKFDTRNNDVQRLFQEFLAVYDNTFENSSLQEQNVQVEEILTDKISKSAKKDRVLKLFPNEKSNGRFAEFLKLIIGNQADFKKHFELEEKAPLQFSKDTYEEELEVLLAQIGDNYAELFLSAKKLYDSILLSGILTVTDVGTQAPLSASMIQRYNEHQMDLAQLKQFIRQKLSDKYNEVFSDVSKDGYAGYIDGKTNQEAFYKYLKGLLNKIEGSGYFLDKIEREDFLRKQRTFDNGSIPHQIHLQEMRAIIRRQAEFYPFLADNQDRIEKLLTFRIPYYVGPLARGKSDFAWLSRKSADKITPWNFDEIVDKESSAEAFINRMTNYDLYLPNQKVLPKHSLLYEKFTVYNELTKVKYKTEQGKTAFFDANMKQEIFDGVFKVYRKVTKDKLMDFLEKEFDEFRIVDLTGLDKENKVFNASYGTYHDLCKILDKDFLDNSKNEKILEDIVLTLTLFEDREMIRKRLENYSDLLTKEQVKKLERRHYTGWGRLSAELIHGIRNKESRKTILDYLIDDGNSNRNFMQLINDDALSFKEEIAKAQVIGETDNLNQVVSDIAGSPAIKKGILQSLKIVDELVKIMGHQPENIVVEMARENQFTNQGRRNSQQRLKGLTDSIKEFGSQILKEHPVENSQLQNDRLFLYYLQNGRDMYTGEELDIDYLSQYDIDHIIPQAFIKDNSIDNRVLTSSKENRGKSDDVPSKDVVRKMKSYWSKLLSAKLITQRKFDNLTKAERGGLTDDDKAGFIKRQLVETRQITKHVARILDERFHTETDENNKKIRQVKIVTLKSNLVSNFRKEFELYKVREINDYHHAHDAYLNAVIGKALLGVYPQLEPEFVYGDYPHFHGHKENKATAKKFFYSNIMNFFKKDDVRTDKNGEIIWKKDEHISNIKKVLSYPQVNIVKKVEEQTGGFSKESILPKGNSDKLIPRKTKKFYWDTKKYGGFDSPIVAYSILVIADIEKGKSKKLKTVKALVGVTIMEKMTFERDPVAFLERKGYRNVQEENIIKLPKYSLFKLENGRKRLLASARELQKGNEIVLPNHLGTLLYHAKNIHKVDEPKHLDYVDKHKDEFKELLDVVSNFSKKYTLAEGNLEKIKELYAQNNGEDLKELASSFINLLTFTAIGAPATFKFFDKNIDRKRYTSTTEILNATLIHQSITGLYETRIDLNKLGGD

SEQ ID NO: 158 - protein, 1345 aa, Streptococcus mutans
MKKPYSIGLDIGTNSVGWAVVTDDYKVPAKKMKVLGNTDKSHIKKNLLGALLFDSGNTAEDRRLKRTARRRYTRRRNRILYLQEIFSEEMGKVDDSFFHRLEDSFLVTEDKRGERHPIFGNLEEEVKYHENFPTIYHLRQYLADNPEKVDLRLVYLALAHIIKFRGHFLIEGKFDTRNNDVQKLFQEFLAVYDNTFENSSLQEQNVQVEEILTDKISKSAKKDRVLKLFPNEKSNGRFAEFLKLIVGNQADFKKHFELEEKAPLQLSKDTYEEELEVLLAQIGDNYAELFLSAKKLYDSILLSGILTVTDVSTKAPLSASMIQRYNEHQMDLAQLKQFIRQKLSDKYNEVFSDVSKDGYAGYIDGKTNQEAFYKYLKGLLNKIEGSGYFLDKIEREDFLRKQRTFDNGSIPHQIHLQEMRAIIRRQAEFYPFLADNQDRIEKILTFRIPYYVGPLARGKSDFAWLSRKSADKITPWNFDEIVDKESSVEAFINRMTNYDLYLPNQKVLPKHSLLYEKFTVYNELTKVKYKTEQGKTAFFDANMKQEIFDGVFKVYRKVTKDKLMDFLEKEFDEFRIVDLTGLDKENKAFNASYGTYHDLRKILDKDFLDNSKNEKILEDIVLTLTLFEDREMIRKRLENYSDLLTKEQVKKLERRHYTGWGRLSAELIHGIRNKESRKTLLDYLIDDGNSNRNFMQLINDDALSFKEEIAKAQVIGETDNLNQVVSDIAGSPAIKKGILQSLKIVDELVKIMGHQPENIVVEMARENQFTNQGRRNSQQRLKGLTDSIKEFGSQILKEHPVENSQLQNDRLFLYYLQNGRDMYTGEELDIDYLSQYDIDHIIPQAFIKDNSIDNRVLTSSKENRGKSDDVPSKDVVRKMKSYWSKLLSAKLITQRKFDNLTKAERGGLTDDDKAGFIKRQLVETRQITKHVARILDERFNTETDENNKKIRQVKIVTLKSNLVSNFRKEFELYKVREINDYHHAHDAYLNAVIGKALLGVYPQLEPEFVYGDYPHFHGHKENKATAKKFFYSNIMNFFKKDDVRTDKNGEIIWKKDEYISNIKKVLSYPQVNIVKKVEEQTGGFSKESILPKGNSDKLIPRKTKKFYWDTKKYGGFDSPIVAYSILVIADIEKGKSKKLKTVKALVGVTIMEKMTFERDPIAFLERKGYRNVQEENIIKLPKYSLFKLENGRKRLLASARELQKGNEIVLPNHLGTLLYHAKNIHKVDEPKHLDYVDKHKDEFKELLDVVSNFSKKYTLAEGNLEKIKELYAQNNGEDLKELASSFINLLTFTAIGAPAAFKFFDKNIDRKRYTSTTEILNATLIHQSITGLYETRIDLSKLGGD

SEQ ID NO: 159 - protein, 1345 aa, Streptococcus mutans
MKKPYSIGLDIGTNSVGWAVVTDDYKVPAKKMKVLGNTDKSHIKKNLLGALLFDSGNTAEDRRLKRTARRRYTRRRNRILYLQEIFSEEMGKVDDSFFHRLEDSFLVTEDKRGECHPIFGNLEEEVKYHENFPTIYHLRQYLADNPEKTDLRLVYLALAHIIKFRGHFLIEGKFDTRNNDVQRLFQEFLAVYDNTFENSSLQEQNVQVEEILTDKISKSAKKDRVLKLFPNEKSNGRFAEFLKLIVGNQADFKKHFELEEKAPLQFSKDTYEEELEVLLAQIGDNYAELFLSAKKLYDSILLSGILTVTDVSTKAPLSASMIQRYNEHQMDLTQLKQFIRQKLSDKYNEVFSDVSKDGYAGYIDGKTNQEAFYKYLKGLLNKIEGNGYFLDKIEREDFLRKQRTFDNGSIPHQIHLQEMRAIIRRQAEFYPFLADNQDRIEKILTFRIPYYVGPLARGKSDFAWLSRKSADKITPWNFDEIVDKESSAEAFINRMTNYDLYLPNQKVLPKHSLLYEKFTVYNELTKVKYKTEQGKTAFFDANMKQEIFDGVFKVYRKVTKDKLMDFLEKEFDEFRIVDLTGLDKENKAFNASYGTYHDLRKILDKDFLDNSKNEKILEDIVLTLTLFEDREMIRKRLENYSDLLTKEQVKKLERRHYTGWGRLSAELIHGIRNKESRKTLLDYLIDDGNSNRNFMQLINDDALSFKEEIAKAQVIGETDNLNQVVSDIAGSPAIKKGILQSLKIVDELVKIMGHQPENIVVEMARENQFTNQGRRNSQQRLKGLTDSIKEFGSQILKEHPVENSQLQNDRLFLYYLQNGRDMYTGEELDIDYLSQYDIDHIIPQAFIKDNSIDNRVLTSSKENRGKSDDVPSKDVVRKMKPYWSKLLSAKLITQRKFDNLTKAERGGLTDDDKAGFIKRQLVETRQITKHVARILDERFNTETDENNKKIRQVKIVTLKSNLVSNFRKEFELYKVREINDYHHAHDAYLNAVIGKALLGVYPQLEPEFVYGDYPHFHGHEENKATAKKFFYSNIMNFFKKDDVRTDKNGEIIWKKDEHISNIKKVLSYPQVNIVKKVEEQTGGFSKESILPKGNSDKLIPRKTKKFYWDTKKYGGFDSPIVAYSILVIADIEKGKSKKLKTVKALVGVTIMEKMTFERDPVAFLERKGYRNVQEENIIKLPKYSLFKLENGRKRLLASARELQKGNEIVLPNHLGTLLYHAKNIHKVDEPKHLDYVDKHKDEFKELLDVVSNFSKKYTLAEGNLEKIKELYAQNNGEDLKELSSSFINLLTFTAIGAPAAFKFFDKNIDRKRYTSTTEILNATLIHQSITGLYETRIDLSKLGGD

SEQ ID NO: 160 - protein, 1345 aa, Streptococcus mutans
MKKPYSIGLDIGTNSVGWAVVTDDYKVPAKKMKVLGNTDKSHIEKNLLGALLFDSGNTAEDRRLKRTARRRYTRRRNRILYLQEIFSEEMGKVDDSFFHRLEDSFLVTEDKRGERHPIFGNLEEEVKYHENFPTIYHLRQYLADNPEKVDLRLVYLALAHIIKFRGHFLIEGKFDTRNNDVQRLFQEFLAVYDNTFENSSLQEQNVQVEEILTDKISKSAKKDRVLKLFPNEKSNGRFAEFLKLIVGNQADFKKHFELEEKVPLQFSKDTYEEELEVLLAQIGDNYAELFLSAKKLYDSILLSGILTVTDVGTKAPLSASMIQRYNEHQMDLAQLKQFIRQKLSDKYNEVFSDVSKDGYAGYIDGKTNQEAFYKYLKGLLNKIEGSGYFLDKIEREDFLRKQRTFDNGSIPHQIHLQEMRAIIRRQAEFYPFLADNQDRIEKLLTFRIPYYVGPLARGKSDFAWLSRKSADKITPWNFDEIVDKESSAEAFINRMTNYDLYLPNQKVLPKHSLLYEKFTVYNELTKVKYKTEQGKTAFFDANMKQEIFDGVFKVYRKVTKDKLMDFLEKEFDEFRIVDLTGLDKENKVFNASYGTYHDLCKILDKDFLDNSKNEKILEDIVLTLTLFEDREMIRKRLENYSDLLTKEQVKKLERRHYTGWGRLSAELIHGIRNKESRKTILDYLIDDGNSNRNFMQLINDDALSFKEEIAKAQVIGETDNLNQVVSDIAGSPAIKKGILQSLKIVDELVKIMGHQPENIVVEMARENQFTNQGRRNSQQRLKGLTDSIKEFGSQILKEHPVENSQLQNDRLFLYYLQNGRDMYTGEELDIDYLSQYDIDHIIPQAFIKDNSIDNRVLTSSKENRGKSDDVPSKDVVRKMKSYWSKLLSAKLITQRKFDNLTKAERGGLTDDDKAGFIKRQLVETRQITKHVARILDERFNTETDENNKKIRQVKIVTLKSNLVSNFRKEFELYKVREINDYHHAHDAYLNAVIGKALLGVYPQLEPEFVYGDYPHFHGHKENKATAKKFFYSNIMNFFKKDDVRTDKNGEIIWKKDEHISNIKKVLSYPQVNIVKKVEEQTGGFSKESILPKGNSDKLIPRKTKKFYWDTKKYGGFDSPIVAYSILVIADIEKGKSKKLKTVKALVGVTIMEKMTFERDPVAFLERKGYRNVQEENIIKLPKYSLFKLENGRKRLLASARELQKGNEIVLPNHLGTLLYHAKNIHKVDEPKHLDYVDKHKDEFKELLDVVSNFSKKYTLAEGNLEKIKELYAQNNGEDLKELASSFINLLTFTAIGAPATFKFFDKNIDRKRYTSTTEILNATLIHQSITGLYETRIDLNKLGGD

SEQ ID NO: 161 - protein, 1345 aa, Streptococcus mutans
MKKPYSIGLDIGTNSVGWAVVTDDYKVPAKKMKVLGNTDKSHIKKNLLGALLFDSGNTAEDRRLKRTARRRYTRRRNRILYLQEIFSEEMGKVDDSFFHRLEDSFLVTEDKRGERHPIFGNLEEEVKYHENFPTIYHLRQYLADNPEKTDLRLVYLALAHIIKFRGHFLIEGKFDTRNNDVQRLFQEFLAVYDNTFENSSLQEQNVQVEEILTDKISKSAKKDRVLKLFPNEKSNGRFAEFLKLIVGNQADFKKHFELEEKAPLQFSKDIYEEELEVLLAQIGDNYAELFLSAKKLYDSILLSGILTVTDVSTKAPLSASMIQRYNEHQMDLAQLKQFIRQKLSDKYNEVFSDVSKDGYAGYIDGKTNQEAFYKYLKGLLNKIEGSGYFLDKIEREDFLRKQRTFDNGSIPHQIHLQEMRAIIRRQAEFYPFLADNQDRIEKILTFRIPYYVGPLARGKSDFAWLSRKSADKITPWNFDEIVDKESSAEAFINRMTNYDLYLPNQKVLPKHSLLYEKFTVYNELTKVKYKTEQGKTAFFDANMKQEIFDGVFKVYRKVTKDKLMDFLEKEFDEFRIVDLTGLDKENKAFNASYGTYHDLRKILDKDFLDNSKNEKILEDIVLTLTLFEDREMIRKRLKNYSDLLTKEQLKKLERRHYTGWGRLSAELIHGIRNKESRKTILDYLIDDGNSNRNFMQLINDDALSFKEEIAKAQVIGETDNLNQVVSDIAGSLAIKKGILQNLKIVDELVKIMGHQPENIVVEMARENQFTNQGRRNSQQRLKGLTDSIKEFGSQILKEHPVENSQLQNDRLFLYYLQNGRDMYTGEELDIDYLSQYDIDHIIPQAFIKDNSIDNRVLTSSKENRGKSDDVPSKDVVRKMKSYWSKLLSAKLITQRKFDNLTKGERGGLTDDDKAGFIKRQLVETRQITKHVARILDERFNTETDENNKKIRQVKIVTLKSNLVSNFRKEFELYKVREINDYHHAHDAYLNAVIGKALLGVYPQLEPEFVYGDYPHFHGHKENKATAKKFFYSNIMNFFKKDDVRTDKNGEIIWKKDEYISNIKKVLSYPQVNIVKKVEEQTGGFFKESILPKGDSDKLIPRKTKKFYWDTKKYGGFDSPIVAYSILVIADIEKGKSKKLKTVKALVGVTIMEKMTFERDPVAFLERKGYRNVQEENIIKLPKYSLFKLENGRKRLLASARELQKGNEIVLPNHLGTLLYHAKNIHKVDEPKHLDYVDKHKDEFKELLDVVSNFSKKYTLAEGNLEKIKELYAQNNGEDLKELASSFINLLTFTAIGAPATFKFFDKNIDRKRYTSTTEILNATLIHQSITGLYETRIDLSKLGGD

SEQ ID NO: 162 - protein, 1345 aa, Streptococcus mutans
MKKPYSIGLDIGTNSVGWAVVTDDYKVPAKKMKVLGNTDKSHIEKNLLGALLFDSGNTAEDRRLKRTARRRYTRRRNRILYLQEIFSEEMGKVDDSFFHRLEDSFLVTEDKRGERHPIFGNLEEEVKYHENFPTIYHLRQYLADNPEKVDLRLVYLALAHIIKFRGHFLIEGKFDTRNNDVQRLFQEFLAVYDNTFENSSLQEQNVQVEEILTDKISKSAKKDRVLKLFPNEKSNGRFAEFLKLIVGNQADFKKHFELEEKAPLQFSKDTYEEELEVLLAQIGDNYAELFLSAKKLYDSILLSGILTVTDVGTKAPLSASMIQRYNEHQMDLAQLKQFIRQKLSDKYNEVFSDVSKDGYAGYIDGKTNQEAFYKYLKGLLNKIEGSGYFLDKIEREDFLRKQRTFDNGSIPHQIHLQEMRAIIRRQAEFYPFLADNQDRIEKLLTFRIPYYVGPLARGKSDFAWLSRKSADKITPWNFDEIVDKESSAEAFINRMTNYDLYLPNQKVLPKHSLLYEKFTVYNELTKVKYKTEQGKTAFFDANMKQEIFDGVFKVYRKVTKDKLMDFLEKEFDEFRIVDLTGLDKENKVFNASYGTYHDLCKILDKDFLDNSKNEKILEDIVLTLTLFEDREMIRKRLENYSDLLTKEQVKKLERRHYTGWGRLSAELIHGIRNKESRKTILDYLIDDGNSNRNFMQLINDDALSFKEEIAKAQVIGETDNLNQVVSDIAGSPAIKKGILQSLKIVDELVKIMGHQPENIVVEMARENQFTNQGRRNSQQRLKGLTDSIKEFGSQILKEHPVENSQLQNDRLFLYYLQNGRDMYTGEELDIDYLSQYDIDHIIPQAFIKDNSIDNRVLTSSKENRGKSDDVPSKDVVRKMKSYWSKLLSAKLITQRKFDNLTKAERGGLTDDDKAGFIKRQLVETRQITKHVARILDERFNTETDENNKKIRQVKIVTLKSNLVSNFRKEFELYKVREINDYHHAHDAYLNAVIGKALLGVYPQLEPEFVYGDYPHFHGHKENKATAKKFFYSNIMNFFKKDDVRTDKNGEIIWKKDEHISNIKKVLSYPQVNIVKKVEEQTGGFSKESILPKGNSDKLIPRKTKKFYWDTKKYGGFDSPIVAYSILVIADIEKSKSKKLKTVKALVGVTIMEKMTFERDPVAFLERKGYRNVQEENIIKLPKYSLFKLENGRKRLLASARELQKGNEIVLPNHLGTLLYHAKNIHKVDEPKHLDYVDKHKDEFKELLDVVSNFSKKYTLAEGNLEKIKELYAQNNGEDLKELASSFINLLTFTAIGAPATFKFFDKNIDRKRYTSTTEILNATLIHQSITGLYETRIDLNKLGGD

SEQ ID NO: 163 - protein, 1355 aa, Streptococcus mutans
MKKPYSIGLDIGTNSVGWAVVTDDYKVPAKKMKVLGNTDKSHIKKNLLGALLFDSGNTAEDRRLKRTARRRYTRRRNRILYLQEIFAEEMSKVDDSFFHRLDESFLTDDDKNFDSHPIFGNKAEEDAYHQKFPTIYHLRKHLADSTEKADLRLVYLALAHMIKFRGHFLIEGELNAENTDVQKLFADFVGVYDRTFDDSHLSEITVDASSILTEKISKSRRLEKLINNYPKEKKNTLFGNLIALSLGLQPNFKTNFKLSEDAKLQFSKDTYEEDLEELLGKIGDDYADLFTLAKNLYDAILLSGILTADDSSTKAPLSASMIKRYAEHHEDLEKLKEFIKANKPELYHDIFKDETKNGYAGYIENGVKQDEFYKYLKNTLSKITGSDYFLDQIEREDFLRKQRTFDNGSIPHQIHLQEMHAILRRQGDYYPFLKENQDRIEKILTFRIPYYVGPLARKNSRFAWAEYHSDEAVTPWNFDQVIDKESSAQAFIEHMTNNDLYLPNEKVLPKHSPLYEKYTVYNELTKIKYVTEIGEAKFFDANLKQEIFDGLFKHERKVTKKKLRTFLDKNFDEFRIVDIQGLDKETETFNASYATYQDLLKVIKDKVFMDNPENAEILENIVLTLTLFEDREMIKQRLAKYADVFDKKVIDQLARRHYTGWGRLSAKLLNGIRDKQSCKTIMDYLIDDAQSNRNLMQLITDDNLTFKDDIVKAQYVDNSDDLHQVVQSLAGSPAIKKGILQSLKIVDELVKVMGKEPEQIVVEMARENQTTAKGRRNSQQRYKRLKEAIKSLDRDLNHKILKEHPTDNQALQNNRLFLYYLQNGRDMYTGESLDINRLSDYDIDHVIPQAFIKDNSIDNRVLTSSKANRGKSDDVPSEDVVNRMRPFWNKLLSSGLISQRKYNNLTKKELTLDDKAGFIKRQLVETRQITKHVARMLDERFNKEFDDNNKRIRRVKIVTLKSNLVSSFRKEFELYKVREINDYHHAHDAYLNAVVVKALLVKYPKLEPEFVYGEYLKYNSYRERKTATQKMFFYSNIMNMFKSKVKLADDQIVERPMIEVNDETGEIAWDKTKHITTVKKVLSYPQVNIVKKVEEQTIGQNGGLFDDNPKSPLEVIPSKLVPLKKALNPEKYGGYQKPTTAYPILLIVDTKQLIPISVMDKKRFEQNPVKFLKDKGYQQIEKNNFVKLPKYTLVDIGNGIKRLWASSKEVHKGNQLVVSKKSQDLLYHAHHLDNDYSNEYVKNHYQQFDILFNEITSFSKKCKLGKEHIQKIEEAYSKERDFASIEELADGFIKLLGFTQLGATSPFSFLGIKLNQKQYTGKKDYLLPCMEATLIHQSITGLYETRIDLSKLGGD

SEQ ID NO: 164 - protein, 1345 aa, Streptococcus mutans
MKKPYSIGLDIGTNSVGWAVVTDDYKVPAKKMKVLGNTDKSHIKKNLLGALLFDSGNTAADRRLKRTARRRYTRRRNRILYLQEIFAEEMSKVDDSFFHRLEDSFLVTEDKRGERHPIFGNLEEEVKYHENFPTIYHLRQYLADNPEKVDLRLVYLALAHIIKFRGHFLIEGKFDTRNNDVQRLFQEFLAVYDNTFENSSLQEQNVQVEEILTDKISKSAKKDRVLKLFPNEKSNGRFAEFLKLIVGNQADFKKHFELEEKAPLQFSKDTYEEELEVLLAQIGDNYAELFLSAKKLYDSILLSGILTVTDVSTKAPLSASMIQRYNEHQMDLVQLKQFIRQKLSDKYNEVFSDVSKDGYAGYIDGKTNQEAFYKYLKGLLNKIEGSGYFLDKIEREDFLRKQRTFDNGSIPHQIHLQEMRAIIRRQAEFYPFLADNQDRIEKILTFRIPYYVGPLARGKSDFAWLSRKSADKITPWNFDEIVDKESSAEAFINRMTNYDLYLPNQKVLPKHSLLYEKFTVYNELTKVKYKTEQGKTAFFDANMKQEIFDGVFKVYRKVTKDKLMDFLEKEFDEFRIVDLTGLDKENKAFNASYGTYHDLRKILDKDFLDNSKNEKILEDIVLTLTLFEDREMIRKRLENYSDLLTKEQVKKLERRHYTGWGRLSAELIHGIRNKESRKTILDYLIDDGNSNRNFMQLINDDALSFKEEIAKAQVIGETDNLNQVVSDIAGSPAIKKGILQSLKIVDELVKIMGHQPENIVVEMARENQFTNQGRRNSQQRLKGLTDSIKEFGSQILKEHPVEHSQLQNDRLFLYYLQNGRDMYTGEELDIDYLSQYDIDHIIPQAFIKDNSIDNRVLTSSKENRGKSDDVPSKNVVRKMKSYWSKLLSAKLITQRKFDNLTKAERGGLTDDDKAGFIKRQLVETRQITKHVARILDERFHTETDENNKKIRQVKIVTLKSNLVSNFRKEFELYKVREINDYHHAHDAYLNAVIGKALLGVYPQLEPEFVYGDYPHFHGHKENKATAKKFFYSNIMNFFKKDDVRTDKNGEIIWKKDEHISNIKKVLSYPQVNIVKKVEEQTGGFSKESILPKGNSDKLIPRKTKKFYWDTKKYGGFDSPIVAYSILVIADIEKGKSKKLKTVKALVGVTIMEKMTFERDPVAFLERKGYRNVQEENIIKLPKYSLFKLENGRKRLLASARELQKGNEIVLPNHLGTLLYHAKNIHKVDEPKHLDYVDKHKDEFKELLDVVSNFSKKYTLAEGNLEKIKELYAQNNGEDLKELASSFINLLTFTAIGAPATFKFFDKNIDRKRYTSTTEILNATLIHQSITGLYETRIDLSKLGGD

SEQ ID NO: 165 - protein, 1345 aa, Streptococcus mutans
MKKPYSIGLDIGTNSVGWAVVTDDYKVPAKKMKVLGNTDKSHIKKNLLGALLFDSGNTAEDRRLKRTTRRRYTRRRNRILYLQEIFSEEMGKVDDSFFHRLEDSFLVTEDKRGERHPIFGNLEEEVKYHENFPTIYHLRQYLADNPEKTDLRLVYLALAHIIKFRGHFLIEGKFDTRNNDVQRLFQEFLAVYDNTFENSSLQEQNVQVEEILTDKISKSAKKDRVLKLFPNEKSNGRFAEFLKLIVGNQADFKKHFELEEKAPLQFSKDTYEEELEVLLAQIGDNYAELFLSAKKLYDSILLSGILTVTDVSTKAPLSASMIQRYNEHQMDLTQLKQFIRQKLSDKYNEVFSDVSKDGYAGYIDGKTNQEAFYKYLKGLLNKIEGSGYFLDKIEREDFLRKQRTFDNGSIPHQIHLQEMRAIIRRQAEFYPFLADNQDRIEKLLTFRIPYYVGPLASGKSDFAWLSRKSADKITPWNFDEIVDKESSAEAFINRMTNYDLYLPNQKVLPKHSLLYEKFTVYNELTKVKYKTEQGKTAFFDANMKQEIFDGVFKVYRKVTKDKLMDFLEKEFDEFRIVDLTGLDKENKVFNASYGTYHDLCKILDKDFLDNSKNEKILEDIVLTLTLFEDREMIRKRLENYSDLLTKEQVKKLERRHYTGWGRLSAELIHGIRNKESRKTILDYLIDDGNSNRNFMQLINDDALSFKEEIAKAQVIGETDNLNQVVSDIAGSPAIKKGILQSLKIVDELVKIMGHQPENIVVEMARENQFTNQGRRNSQQRLKGLTDSIKEFGSQILKEHPVENSQLQNDRLFLYYLQNGRDMYTGEELDIDYLSQYDIDHIIPQAFIKDNSIDNRVLTSSKENRGKSDDVPSKDVVRKMKSYWSKLLSAKLITQRKFDNLTKAERGGLTDDDKAGFIKRQLVETRQITKHVARILDERFNTETDENNKKIRQVKIVTLKSNLVSNFRKEFELYKVREINDYHHAHDAYLNAVIGKALLGVYPQLEPEFVYGDYPHFHGHKENKATAKKFFYSNIMNFFKKDDVRTDKNGEIIWKKDEHISNIKKVLSYPQVNIVKKVEEQTGGFSKESILPKGNSDKLIPRKTKKFYWDTKKYGGFDSPIVAYSILVIADIEKGKSKKLKTVKALVGVTIMEKMTFERDPVAFLERKGYRNVQEENIIKLPKYSLFKLENGRKRLLASARELQKGNEIVLPNHLGTLLYHAKNIHKVDEPKHLDYVDKHKDEFKELLDVVSNFSKKYTLAEGNLEKIKELYAQNNGEDLKELASSFINLLTFTAIGAPATFKFFDKNIDRKRYTSTTEILNATLIHQSITGLYETRIDLSKLGGD

SEQ ID NO: 166 - protein, 1355 aa, Streptococcus mutans
MKKPYSIGLDIGTNSVGWAVVTDDYKVPAKKMKVLGNTDKSHIKKNLLGALLFDSGNTAADRRLKRTARRRYTRRRNRILYLQEIFAEEMNKVDDSFFHRLDESFLTDDDKNFDSHPIFGNKAEEDAYHQKFPTIYHLRKHLADSTEKADLRLVYLALAHMIKFRGHFLIEGELNAENTDVQKLFADFVGVYDRTFDDSHLSEITVDASSILTEKISKSRRLEKLINNYPKEKKNTLFGNLIALSLGLQPNFKTNFKLSEDAKLQFSKDTYEEDLEELLGKIGDDYADLFTLAKNLYDAILLSGILTADDSSTKAPLSASMIKRYAEHHEDLEKLKEFIKANKPELYHDIFKDETKNGYAGYIENGVKQDEFYKYLKNTLSKIAGSDYFLDKIEREDFLRKQRTFDNGSIPHQIHLQEMHAILRRQGDYYPFLKENQDRIEKILTFRIPYYVGPLARKNSRFAWAEYHSDEAVTPWNFDQVIDKESSAQAFIEHMTNNDLYLPNEKVLPKHSPLYEKYTVYNELTKIKYVTEIGEAKFFDANLKQEIFDGLFKHERKVTKKKLRTFLDKNFDEFRIVDIQGLDKETETFNASYATYQDLLKVIKDKVFMDNPENAEILENIVLTLTLFEDREMIKQRLAKYADVFDKKVIDQLARRHYTGWGRLSAKLLNGIRDKQSCKTIMDYLIDDAQSNRNLMQLITDDNLTFKDDIVKAQYVDNSDDLHQVVQSLAGSPAIKKGILQSLKIVDELVKVMGKEPEQIVVEMARENQTTAKGRRNSQQRYKRLKEAIKSLDRDLNHKILKEHPTDNQALQNNRLFLYYLQNGRDMYTGESLDINRLSDYDIDHVIPQAFIKDNSIDNRVLTSSKANRGKSDDVPSEDVVNRMRPFWNKLLSSGLISQRKYNNLTKKELTLDDKAGFIKRQLVETRQITKHVARMLDERFNKEFDDNNKRIRRVKIVTLKSNLVSSFRKEFELYKVREINDYHHAHDAYLNAVVVKALLVKYPKLEPEFVYGEYPKYNSYRERKTATQKMFFYSNIMNMFKSKVKLADDQIVERPMIEVNDETGEIAWDKTKHITTVKKVLSYPQVNIVKKVEEQTIGQNGGLFDDNPKSPLEVIPSKLVPLKKALNPEKYGGYQKPTTAYPILLIVDTKQLIPISVMDKKRFEQNPVKFLKDKGYQQIEKNNFVKLPKYTLVDIGNGIKRLWASSKEVHKGNQLVVSKKSQDLLYHAHHLDNDYSNEYVKNHYQQFDILFNEITSFSKKCKLGKEHIQKIEEAYSKERDSASIEELADGFIKLLGFTQLGATSPFSFLGIKLNQKQYTGKKDYLLPCMEATLIHQSITGLYETRIDLSKLGGD

SEQ ID NO: 167 - protein, 1345 aa, Streptococcus mutans
MKKPYSIGLDIGTNSVGWAVVTDDYKVPAKKMKVLGNTDKSHIKKNLLGALLFDSGNTAADRRLKRTARRRYTRRRNRILYLQEIFAEEMSKVDDSFFHRLEDSFLVTEDKRGERHPIFGNLEEEVKYYENFPTIYHLRQYLADNPEKVDLRLVYLALAHIIKFRGHFLIEGKFDTRNNDVQRLFQEFLAVYDNTFENSSLQEQNVQVEEILTDKISKSAKKDRVLKLFPNEKSNGRFAEFLKLIVGNQADFKKHFELEEKAPLQFSKDTYEEDLEELLGKIGDDYADLFTLAKNLYDAILLSGILTADDSSTKAPLSASMIQRYNEHQMDLAQLKQFIRQKLSDKYNEVFSDVSKDGYAGYIDGKTNQEAFYKYLKGLLNKIEGSGYFLDKIEREDFLRKQRTFDNGSIPHQIHLQEMRAIIRRQAEFYPFLADNQDRIEKILTFRIPYYVGPLARGKSDFAWLSRKSADKITPWNFDEIVDKESSAEAFINRMTNYDLYLPNQKVLPKHSLLYEKFTVYNELTKVKYKTEQGKTAFFDANMKQEIFDGVFKVYRKVTKDKLMDFLEKEFDEFRIVDLTGLDKENKVFNASYGTYHDLCKILDKDFLDNSKNEKILEDIVLTLTLFEDREMIRKRLENYSDLLTKEQVKKLERRHYTGWGRLSAELIHGIRNKESRKTILDYLIDDGNSNRNFMQLINDDALSFKEEIAKAQVIGETDNLNQVVSDIAGSPAIKKGILQSLKIVDELVKIMGHQPENIVVEMARENQFTNQGRRNSQQRLKGLTDSIKEFGSQILKEHPVENSQLQNDRLFLYYLQNGRDMYTGEELDIDYLSQYDIDHIIPQAFIKDNSIDNRVLTSSKENRGKSDDVPSKDVVRKMKPYWSKLLSAKLITQRKFDNLTKAERGGLTDDDKAGFIKRQLVETRQITKHVARILDERFNTETDENNKKIRQVKIVTLKSNLVSNFRKEFELYKVREINDYHHAHDAYLNAVIGKALLGVYPQLEPEFVYGDYPHFHGHEENKATAKKFFYSNIMNFFKKDDVRTDKNGEIIWKKDEHISNIKKVLSYPQVNIVKKVEEQTGGFSKESILPKGNSDKLIPRKTKKFYWDTKKYGGFDSPIVAYSILVIADIEKGKSKKLKTVKALVGVTIMEKMTFERDPVAFLERKGYRNVQEENIIKLPKYSLFKLENGRKRLLASARELQKGNEIVLPNHLGTLLYHAKNIHKVDEPKHLDYVDKHKDEFKELLDVVSNFSKKYTLAEGNLEKIKELYAQNNGEDLKELASSFINLLTFTAIGAPATFKFFDKNIDRKRYTSTTEILNATLIHQSITGLYETRIDLSKLGGD

SEQ ID NO: 168 - protein, 1345 aa, Streptococcus mutans
MKKPYSIGLDIGTNSVGWAVVTDDYKVPAKKMKVLGNTDKSHIKKNLLGALLFDSGNTAEDRRLKRTTRRRYTRRRNRILYLQEIFSEEMGKVDDSFFHRLEDSFLVTEDKRGERHPIFGNLEEEVKYHENFPTIYHLRQYLADNPEKTDLRLVYLALAHIIKFRGHFLIEGKFDTRNNDVQRLFQEFLAVYDNTFENSSLQEQNVQVEEILTDKISKSAKKDRVLKLFPNEKSNGRFAEFLKLIVGNQADFKKHFELEEKAPLQFSKDTYEEELEVLLAQIGDNYAELFLSAKKLYDSILLSGILTVTDVSTKAPLSASMIQRYNEHQMDLTQLKQFIRQKLSDKYNEVFSDVSKDGYAGYIDGKTNQEAFYKYLKGLLNKIEGSGYFLDKIEREDFLRKQRTFDNGSIPHQIHLQEMRAIIRRQAEFYPFLADNQDRIEKLLTFRIPYYVGPLASGKSDFAWLSRKSADKITPWNFDEIVDKESSAEAFINRMTNYDLYLPNQKVLPKHSLLYEKFTVYNELTKVKYKTEQGKTAFFDANMKQEIFDGVFKVYRKVTKDKLMDFLEKEFDEFRIVDLTGLDKENKVFNASYGTYHDLCKILDKDFLDNSKNEKILEDIVLTLTLFEDREMIRKRLENYSDLLTKEQVKKLERRHYTGWGRLSAELIHGIRNKESRKTILDYLIDDGNSNRNFMQLINDDALSFKEEIAKAQVIGETDNLNQVVSDIAGSPAIKKGILQSLKIVDELVKIMGHQPENIVVEMARENQFTNQGRRNSQQRLKGLTDSIKEFGSQILKEHPVENSQLQNDRLFLYYLQNGRDMYTGEELDIDYLSQYDIDHIIPQAFIKDNSIDNRVLTSSKENRGKSDDVPSKDVVRKMKSYWSKLLSAKLITQRKFDNLTKAERGGLTDDDKAGFIKRQLVETRQITKHVARILDERFNTETDENNKKIRQVKIVTLKSNLVSNFRKEFELYKVREINDYHHAHDAYLNAVIGKALLGVYPQLEPEFVYGDYPHFHGHKENKATAKKFFYSNIMNFFKKDDVRTDKNGEIIWKKDEHISNIKKVLSYPQVNIVKKVEEQTGGFSKESILPKGNSDKLIPRKTKKFYWDTKKYGGFDSPIVAYSILVIADIEKGKSKKLKTVKALVGVTIMEKMTFERDPVAFLERKGYRNVQEENIIKLPKYSLFKLENGRKRLLASARELQKGNEIVLPNHLGTLLYHAKNIHKVDEPKHLDYVDKHKDEFKELLDVVSNFSKKYTLAEGNLEKIKELYAQNNGEDLKELASSFINLLTFTAIGAPATFKFFDKNIDRKRYTSTTEILKATLIHQSITGLYETRIDLSKLGGD

SEQ ID NO: 169 - protein, 1338 aa, Streptococcus mutans
MDLIGTNSVGWAVVTDDYKVPAKKMKVLGNTDKSHIKKNLLGALLFDSGNTAADRRLKRTARRRYTRRRNRILYLQEIFAEEMSKVDDSFFHRLEDSFLVTEDKRGERHPIFGNLEEEVKYHENFPTIYHLRQYLADNPEKVDLRLVYLALAHIIKFRGHFLIEGKFDTRNNDVQRLFQEFLAVYDNTFENSSLQEQNVQVEEILTDKISKSAKKDRVLKLFPNEKSNGRFAEFLKLIVGNQADFKKHFELEEKAPLQFSKDTYEEELEVLLAQIGDNYAELFLSAKKLYDSILLSGILTVTDVSTKAPLSASMIQRYNEHQMDLAQLKQFIRQKLSDKYNEVFSDVSKDGYAGYIDGKTNQEAFYKYLKGLLNKIEGSGYFLDKIEREDFLRKQRTFDNGSIPHQIHLQEMRAIIRRQAEFYPFLADNQDRIEKILTFRIPYYVGPLARGKSDFAWLSRKSADKITPWNFDEIVDKESSAEAFINRMTNYDLYLPNQKVLPKHSLLYEKFTVYNELTKVKYKTEQGKTAFFDANMKQEIFDGVFKVYRKVTKDKLMDFLEKEFDEFRIVDLTGLDKENKAFNASYGTYHDLRKILDKDFLDNSKNEKILEDIVLTLTLFEDREMIRKRLENYSDLLTKEQVKKLERRHYTGWGRLSAELIHGIRNKESRKTILDYLIDDGNSNRNFMQLINDDALSFKEEIAKAQVIGETDNLNQVVSDIAGSPAIKKGILQSLKIVDELVKIMGHQPENIVVEMARENQFTNQGRRNSQQRLKGLTDSIKEFGSQILKEHPVEHSQLQNDRLFLYYLQNGRDMYTGEELDIDYLSQYDIDHIIPQAFIKDNSIDNRVLTSSKENRGKSDDVPSKNVVRKMKSYWSKLLSAKLITQRKFDNLTKAERGGLTDDDKAGFIKRQLVETRQITKHVARILDERFHTETDENNKKIRQVKIVTLKSNLVSNFRKEFELYKVREINDYHHAHDAYLNAVIGKALLGVYPQLEPEFVYGDYPHFHGHKENKATAKKFFYSNIMNFFKKDDVRTDKNGEIIWKKDEHISNIKKVLSYPQVNIVKKVEEQTGGFSKESILPKGNSDKLIPRKTKKFYWDTKKYGGFDSPIVAYSILVIADIEKGKSKKLKTVKALVGVTIMEKMTFERDPVAFLERKGYRNVQEENIIKLPKYSLFKLENGRKRLLASARELQKGNEIVLPNHLGTLLYHAKNIHKVDEPKHLDYVDKHKDEFKELLDVVSNFSKKYTLAEGNLEKIKELYAQNNGEDLKELASSFINLLTFTAIGAPATFKFFDKNIDRKRYTSTTEILNATLIHQSITGLYETRIDLSKLGGD

SEQ ID NO: 170 - protein, 1373 aa, Streptococcus oralis
MENKNYSIGLDIGTNSVGWAVITDDYKVPSKKMKVLGNTDKRFIKKNLIGALLFDEGTTAEARRLKRTARRRYTRRKNRLRYLQEIFAEEMSKVDSSFFHRLDDSFLIPEDKKGSKYPIFATLIEEKEYHKQFPTIYHLRKQLADSKEKTDLRLIYLALAHMIKYRGHFLYEDTFDIKNNDIQKIFNEFISIYNNTFEGNSLSGQNVQVEAIFTDKISKSAKRERVLKLFPDEKSTGLFSEFLKLIVGNQADFKKHFDLEEKAPLQFSRDTYDEDLENLLGQIGDDFADLFVAAKKLYDAILLSGILTVTDPSTKAPLSASMIERYENHQKDLATLKQFIKTNLPEKYDEVFSDQSKDGYAGYIDGKTTQESFYKYIKNLLSKFEGADYFLEKIEREDFLRKQRTFDNGSIPHQIHLQEMNAILRRQGEHYPFLKENKEKIEKILTFRIPYYVGPLARGNRDFAWLTRNSDQAIRPWNFEEIVDKASSAESFINKMTNYDLYLPEEKVLPKHSLLYETFAVYNELTKVKFIAEGLRDYQFLDSRQKKDIFYTLFKAEDKRKVTEKDIIQYLHTVDGYDGIELKGIEKQFNASLSTYHDLLKIIKDKEFMDDPNNEEILENIVHTLTIFEDREMIKQRLAQYDSLFDEKVIKALTRRHYTGWGKLSSKLINGIRDKQTGKTILDYLMDDGYNNRNFMQLINDDELSFKEIIKKAQVVGKTDDVKQVVQELPGSPAIKKGILQSIKLVDELVKVMGHEPESIVIEMARENQTTARGKKNSQQRYKRIEDSLKILASGLNAKILKEHPTDNIQLQNDRLFLYYLQNGRDMYTGKPLDINQLSSYDIDHIVPQAFIKDDSLDNRVLTSLKDNRGKSDNVPSLEVVEKMKTFWQQLLDSKLISYRKFNNLTKAERGGLDERDKVGFIKRQLVETRQITKHVAQILDARYNTEVNEKDKKNRTVKIITLKSNLVSNFRKEFRLYKIREINDYHHAHDAYLNAVVAKAILKKYPKLEPEFVYGDYQKYDLKRYISRSKDPKEIEKATEKYFFYSNLLNFFKEEVHYADGTIVKRENIEYSKDTGEIAWNKEKDFATIKKVLSLPQVNIVKKREVQTGGFSKESILPKGNSDKLIPRKTKDILWDTTKYGGFDSPVIAYSILLIADIEKGKAKRLKTVKTLVGITIMEKATFEKSPIAFLENKGYHNVRKENILCLPKYSLFELKNGRRRMLASAKELQKGNEIVLPVHLTTLLYHAKNIHRLDEPEHLEYIQKHRNEFKGLLNLVSEFSQKYVLADANLEKIKNLYADNEQADIEILANSFINLLTFTALGAPAAFKFFGKDVDRKRYTTVSEILNATLIHQSITGLYETRIDLSKLGED

SEQ ID NO: 171 - protein, 1371 aa, Streptococcus oralis
MENKNYSIGLDIGTNSVGWSVITDDYKVPSKKMKVLGNTDKRFIKKNLIGALLFDEGTTAEARRLKRTARRRYTRRKNRLRYLQEIFAEEMSKVDSSFFHRLDDSFLIPEDKRGSKYPIFATLAEEKEYHKQFPTIYHLRKQLADSKEKTDLRLIYLALAHMIKYRGHFLYEDTFDIKNNDIQKIFSEFISIYDNTFEGSSLSGQNAQVEAIFTDKISKSAKRERVLKLFPDEKSTGLFSEFLKLIVGNQADFKKHFDLGEKAPLQFSKDTYDEDLENLLGQIGDDFADLFLVAKKLYDAILLSGILTVTDPSTKAPLSASMIERYENHQKDLAVLKQFIKNNLPEKYDEVFSDQSKDGYAGYIDGKTTQEAFYKYIKNLLSKFEGTDYFLEKIEREDFLRKQRTFDNGSIPHQIHLQEMNAILRRQGEHYPFLKDNKEKIEKILTFRIPYYVGPLARGNRDFAWLTRNSDEAIRPWNFEEIVDKASSAEDFINKMTNYDLYLPEEKVLPKHSLLYETFAVYNELTKVKFIAEGLRDYQFLDSGQKKQIVTQLFKEKRKVTEKDIIQFLHNVDGYDGIELKGIEKQFNASLSTYHDLLKIIKDKEFMDDSKNEEILENIVHTLTIFEDREMIKQRLAQYDSLFDEKVIKALIRRHYTGWGKLSAKLIDGICDKQTGNTILDYLIDDGKNNRNFMQLINDDGLSFKEITQKAQVVGKTDDVKQVVQELPGSPAIKKGILQSIKIVDELVKVMGHTPESIVIEMARENQTTARGKKNSQQRYKRIEDALKNLASGLDSNILKEHPTNNIQLQNDRLFLYYLQNGRDMYTGKPLDINQLSSYDIDHIVPQAFIKDDSLDNRVLTSLKDNRGKSDNVPSIEVVQKRKAFWQQLLDSKLISERKFNNLTKAERGGLDERDKVGFIKRQLVETRQITKHVAQILDARFNKEVNEKDKKNRTVKIITLKSNLVSNFRKEFRLYKVREINDYHHAHDAYLNAVVAKAILKKYPKLEPEFVYGDYQKYDLKRYISRSRNPKEVEKATEKYFFYSNLLNFFKEEVHYADGTIVKRENIEYSKDTGEIAWNKEKDFATIKKVLSYPQVNIVKKREVQTGGFSKESILPKGNSDKLIPRKTKDILWETTKYGGFDSPVIAYSILLIADIEKGKAKKLKTVKTLVGITIMEKAAFEENPITFLENKGYHNVRKENILCLPKYSLFELENGRRRLLASAKELQKGNEIVLPVYLTTLLYHSKNVHKLDEPEHLEYIQKHRNEFKDLLNLVSEFSQKYVLADANLEKIQNLYADNEQADIEILANSFINLLTFTALGAPAAFKFFGKDIDRKRYTTVSEILNATLIHQSITGLYETRIDLSKLGED

SEQ ID NO: 172 - protein, 1366 aa, Streptococcus parasanguinis
MKKPYSIGLDIGTNSVGWAVITDDYKVPAKKMKVLGNTNKESIKKNLIGALLFDAGNTAADRRLKRTARRRYTRRRNRILYLQEIFAAEMNKVDESFFHRLDDSFLVPEDKRGSKYPIFGTLEEEKEYHKQFPTIYYLRKILADSKEKVDLRLIYLALAHIIKYRGHFLYEDSFDIKNNDIQKIFNEFTILYDNTFEESSLSKGNAQVEEIFTDKISKSAKRDRVLKLFPDEKSTGLFSEFLKLIVGNQADFKKHFDLEEKAPLQFSKDTYEEDLESLLGQIGDVYADLFVVAKKLYDAILLAGILSVKDPGTKAPLSASMIERYDNHQNDLSALKQFVRRNLPEKYAEVFSDDSKDGYAGYIDGKTTQEGFYKYIKNLISKIEGAEYFLEKIEREDFLRKQRTFDNGSIPHQIHLQEMNAILRHQGEYYPFLKENKDKIEQILTFRIPYYVGPLARGNSDFAWLSRNSDEAIRPWNFEEMVDKSSSAEDFIHRMTNYDLYLPEEKVLPKHSLLYETFTVYNELTKVKYIAEGMKDYQFLDSGQKKQIVNQLFKEKRKVTEKDIIHYLHNVDGYDGIELKGIEKHFNSSLSTYHDLLKIIKDKEFMDDPKNEEIFENIVHTLTIFEDRVMIKQRLNQYDSIFDEKVIKALTRRHYTGWGKLSAKLINGIRDKKTSKTILDYLIDDGYSNRNFMQLINDDGLSFKETIQKAQVVGETNDVKQVVQELPGSPAIKKGILQSIKIVDELVKVMGHAPESVVIEMARENQTTNKGKSKSQQRLKTLSDAISELGSNILKEHPTDNIQLQNDRLFLYYLQNGKDMYTGEALDINQLSNYDIDHIIPQAFIKDDSLDNRVLTSSKDNRGKSDNVPSLEIVEKMKGFWQQLLDSKLISERKFNNLTKAERGGLDERDKVGFIKRQLVETRQITKHVAQILDDRFNAEVNEKNQKLRSVKIITLKSNLVSNFRKEFGLYKVREINDYHHAHDAYLNAVVAKAILKKYPKLEPEFVYGDYQKYDLKRYISRTKDPKEIEKATEKYFFYSNLLNFFKDKVYYADGTIIQRGNVEYSKDTGEIAWNKKRDFAIVRKVLSYPQVNIVKKTEEQTGGFSKESILPKGNSDKLIPRKTKNVQLDTTKYGGFDSPVIAYSILLVADVEKGKSKKLKTVKSLIGITIMEKVKFEANPVAFLEGKGYQNVVEENIIRLPKYSLFELENGRRRMLASAKELQKGNEMVLPSYLIALLYHAKRIQKKDEPEHLEYIKQHHSEFNDLLNFVSEFSQKYVLAESNLEKIKNLYIDNEQTNMEEIANSFINLLTFTAFGAPAVFKFFGKDIERKRYSTVTEILKATLIHQSLTGLYETRIDLSKLGEE

SEQ ID NO: 173 - protein, 1337 aa, Streptococcus parauberis
MKVLGNTDRQTVKKNMIGTLLFDSGETAEARRLKRTARRRYTRRINRIKYLQSIFDDEMSKIDSAFFQRIKDSFLVPDDKNDDRHPIFGNIKDEVDYHKNYPTIYHLRKKLADSDEKADLRLIYLALAHIIKFRGHFLIEGDLDSQNTDVNALFLKLVDTYNLMFEDDKIDTQTIDATVILTEKMSKSRRLENLIAKIPNQKKNTLFGNLISLSLGLTPNFKANFELSEDAKLQISKESFEEDLDNLLAQIGDQYADLFIAAKNLSDAILLSDILTVKGVNTKAPLSASMVQRFNEHQDDLKLLKKLVKVQLPEKYKEIFDIKDKNGYAGYINGKTSQEDFYKYIKPILSKLKGAESLISKLEREDFLRKQRTFDNGSIPHQIHLNELKSIIRRQEKYYPFLKDKQVRIEKIFTFRIPYFVGPLANGNSSFAWVKRRSNESITPWNFEEVVEQEASAKVFIERMTNFDTYLPEEKVLPKHSLLYEMFTVYNELTKVKYQAEGMRKPEFLSSEEKIEIVSNLFKTERKVTVKQLKENYFNKIRCLDSITISGVEDKFNASLGTYHDLLNIIKNQKILDDEQNQDSLEDIVLTLTLFEDEKMIAKRLSKYESIFDPSILKKLKKRHYTGWGRLSQKLINGIRDKQTGKTILDFLIEDGQANRNFMQLINDPSLDFASIIKEAQEKTIKSEKLEETIANLAGSPAIKKGILQSVKIVDEVVKVMGYEPSNIVIEMARENQSTQRGINNSRERLRKLEEVHKNIGSKILKEHEISNAQLQSDRVYLYLLQDGKDMYTGKDLDFDRLSQYDIDHIIPQSFIKDNSIDNIVLTSQESNRGKSDNVPYIAIVNKMKSYWQHQLKSGAISQRKFDNLTKAERGGLSEYDKAGFIKRQLVETRQITKHVAQILNNRFNNNVDDSSKNKRPVKIITLKSKMVSDFRKEFGFYKIREVNDYHHAHDAYLNAVVGTALLKKYPKLEAEFVYGDYKHYDLASLVVKSDTSLGKATAKMFFYSNIMNFFKKEVRLADGTVITRPQIETNTETGEIVWDKVKDIKTIRKVLSIPQINVVKKTEVQTGGFSKESILSKRDSDKLIPRKNNWDPKKYGGFGSPIIAYSVLVVAKVTKGKSQKTKSVKELVGITIMEQNEFEKDRITFLEKKGYQDIQESLIIKLPKFSLFELENGRKRLLASAKELQKGNELSLPNKYIQFLYLASRYTSFSGKEEDREKHRHFVESHLHYFDEIKDIIADFSRRYILADANLEKILTLYNEKNQFSIEEQATNMLNLFTFTGLGAPATLKFFNVDIDRKRYTSSTEILNSTLIRQSITGLYETRIDLSKIGGD

SEQ ID NO: 174 - protein, 1368 aa, Streptococcus phocae
MVEKKSYSIGLDIGTNSVGWAVITDDYKVPAKKMKVLGNTSRQSIKKNMIGALLFDEGGPAASTRVKRTTRRRYTRRKNRLCYLRDIFESEMHTIDKHFFLRLEDSFLHKSDKRYEAHPIFGTLQEEKAYHDNYPTIYHLRKALADNTEKADLRLIYLALAHIIKFRGHFLIEGALSANNTDVQQLVHALVDAYNIMFEEDQLDIEAIDVKAILTEKISKTRRLENLISNIPGQKKNGLFGNLIALSLGLTPNFKSHFNLPEDAKLQLAKDTYDEELNNLLTQIGDEYADLFLSAKNLSDAILLSDILTVNGDGTQAPLSASLIKRYEEHRQDLALLKQMFKEQLPDLYRDVFTDENKDGYAGYISGKTSQEAFYKYIKPILETLDGAEDFLTKINREDFLRKQRTFDNGSIPHQIHLGELQAILERQQAYYPFLKDNQEKIEKILTFRIPYYIGPLARGNSRFAWLTRTSDQKITPWNFDEMVDQEASAQAFIERMTNFDEYLPQEKVLPKHSLTYEYFTVYNELTKVKYVTEGMTKPEFLSAGQKEQIVELLFKKYRKVTVKQLKEDFFSKIECFDTVDISGVEDKFNASLGTYHDLLKIIKDKAFLDNSENENIIEDIILTLTLFEDKEMIANRLAVYEDLFDQNVLKQLKRRHYTGWGRLSKQLINGMRDKHTGKTILDFLKADGFINRNFMQLINDDNLSFKEEIKKAQEGGLKDSINDQIRDLAGSPAIKKGILQTINIVDEIVKIMGKAPQHIVVEMARDVQKTDIGVKQSRERMKRVQEVLKKLGSQLLKEHPVENFQLQNERLYLYYLQNGKDMYTGEELSISNLSHYDIDHIIPRSFIKDDSIDNKVLTRSEHNRGKTDNVPSIEVVKRMKPYWQKLLDTKVISQRKFDNLTKAERGGLQESDKANFIQRQLVETRQITKHVAQILDSRFNTERDEKDRPIRRVKVITLKSKFVSDFRQDFGFYKLREINDYHHAHDAYLNAVVGTALLKMYPKLASEFVYGDYQKYDLKRMVGKSGKASGHATAKYFFYSNLMNFFKSEVKLANGNIIKRSPIEVNEETGEIVWDKTKDFGTVRKVLSAPQVNIVKKTEIQTGGFSNETILSKGKSSKLIPRKNKWRDTTKYGGFNTPTVAYSVLVVAKVEKGKAKKLKPVKELVGITIMERTKFEANPIAFLESKGYHDIQEHLMITLPKYSLFELENGRRRLLASATELQKGNEMVLPQHLVTFLYRVSKRDKGTQSENMEYISNHKEKFIEIFHYIIRYAEKNVIKPKVIERLNDTFNQKFNDSDLTELSISFLNLFKFTSFGAPEKFTFLNSEIKQDDVRYRSTKECLNSTLIHQSVTGLYETRIDLSQFGGD

SEQ ID NO: 175 - protein, 1376 aa, Streptococcus pseudopneumoniae
MSNKPYSIGLDIGTNSVGWAVITDDYKVPSKKMKVLGNTDKHFIKKNLIGALLFDEGTTAEDRRLKRTARRRYTRRKNRLRYLQEIFSEEISKVDNSFFHRLDDSFLVPEDKRGSKYPIFATLTEEKEYYKQFPTIYHLRKQLADSKEKADLRLIYLTLAHMIKYRGHFLYEESFDIKNNDIQKIFNEFISIYDNTFEGSSLSGQNAQVEAIFTDKISKSTKRERVLKLFPDQKSTGLFSEFLKLIVGNQADFKKHFDLEEKAPLQFSKDTYDEDLENLLGQIGDDFADLFLVAKKLYDAILLSGILTVTDPSTKAPLSASMIERYENHQKDLAALKQFIKNNLPEKYDEVFSDQSKEGYAGYIDSKTTQEAFYKYIKNLLSKIDGADYLLDKIEREDFLRKQRTFDNGSIPHQIHLQEMNAILRRQGEHYPFLKENREKIEKILTFRIPYYVGPLARGNRDFAWLTRNSDQAIRPWNFEEIVDKASSAEAFINKMTNYDLYLPEEKVLPKHSLLYETFAVYNELTKVKFIAEGLRDYQFLDSGQKKKIINQLFKEKRKVTEKDLIHYLHNVDGYDGIELKGIEKQFNASLSTYHDLLKIIKDKRFMDEPKNQEILENIVHTLTIFEDREMIKQRLAQYASIFDEKVIKTLTRRHYTGWGKLSAKLINCIRDRKTGKTILDYLIDDGYNNRNFMQLINDDGLSFKEIIQESQVVGKPDDVKQIVQELPGSSAIKKGILQSIKLVDELVKVMGHDPESIVIEMARENQTTARGKKNSQQRYKRIEDSLKILASGLNSNILKEHPTDNIQLQNDRLFLYYLQNGKDMYTGNPLDINHLSSYDIDHIIPQAFIKDDSLDNRVLTSSKDNRGKSDNVPSLEVVQKRKAFWQQLLESKLISERKFNNLTKAERGGLNERDKVGFIKRQLVETRQITKHVAQILDSRFNTKVNEKNQKIRTVKIITLKSNLVSNFRKEFRLYKVREINDYHHAHDAYLNAVVAKAILKKYPKLEPEFVYGDYQKYDLKRYISRSRDPKEIEKATEKYFFYSNLLNFFKEEVHYADGTIVKRENIEYSKDTGEIAWNKEIDFATIRKILSLSQVNIVKKTEEQTVGQNGGLFDNNIVSKKKVVDASKLIPIKSGLSPEKYGGYARPTIAYSVLVIADIEKGKAKKLKRIKEMVGITIQDKKKFEANPTAYLEEYGYKNINPNLIIKLPKYSLFKFNDGQRRLLASSIELQKGNELILPYHFTTLLYHAQRINKISEPIHKQYVETHQSEFEELLTTIISLSKKYIQKPIVESLLQQAFEQADKDIYQLSESFISLLKLTSFGAPGAFRFLGVEISQSNVRYQSVSSCFNATLIHQSITGLYETRIDLSKLGED

SEQ ID NO: 176 - protein, 1376 aa, Streptococcus pseudopneumoniae
MSNKPYSIGLDIGTNSVGWVIITDDYKVPSKKMKVLGNTDKHFIKKNLIGALLFDEGTTAEDRRLKRTARRRYTRRKNRLRYLQEIFAEEMNKVDSSFFHRLDDSFLVPEDKRGSKYPIFATLAEEKEYHKNFPTIYHLRKQLADSKEKADLRLIYLALAHMIKYRGHFLYEEAFDIKNNDIQKIFNEFINIYDNTFEGSSLSGQNEQVEAIFSDKISKSAKRERVLKLFPDEKSTGLFSEFLKLIVGNQADFKKHFDLEEKAPLQFSKDTYDEDLENLLGQIGDGFADLFLVAKKLYDAILLSGILTVTDPSTKAPLSASMIERYQNHQNDLASLKQFIKNNLPEKYDEVFSDQSKDGYAGYVDGKTTQEAFYKYIKNLLSKFEGADYFLEKIEREDFLRKQRTFDNGSIPHQIHLQEMNAILRRQGEHYPFLKENKEKIEKILTFRIPYYVGPLARGNRDFAWLTRNSDQAIRPWNFEEIVDKASSAEDFINKMTNYDLYLPEEKVLPKHSLLYETFAVYNELTKVKFIAEGLRDYQFLDSGQKKQIVNQLFKEKRKVTEKDIIQYLHNVDGYDGIELKGIEKQFNASLSTYHDLLKIIKDKEFMDDSKNEEILENIVHTLTIFEDREMIKQRLAQYDSIFDEKVIKALTRRHYTGWGKLSAKLINGIRDKQTGKTILDYLIDDGYSNRNFMQLINDDGLSFKEIIQKAQVFGKTNDVKQVVQELPGSPAIKKGILQSIKIVEELVKVMGHEPESIVIEMARENQTTTRGKKNSQQRYKRIENSLKILASGLNSKILKEHPTDNNQLQNDRLFLYYLQNGKDMYTGEALDINQLSSCDIDHIIPQAFIKDDSLDNRVLTSSKENRGKSDNVPCLEVVDKMKVFWQQLLDFKLISYRKFNNLTKAERGGLDERDKVGFIRRQLVETRQITKHVAQILDSRFNTEVTEKDKKNRNVKIITLKSNLVSNFRKEFGLYKVREINDYHHAHDAYLNAVVAKAILKKYPKLEPEFVYGDYQKYDLKRYISRSKDPKDIEKATEKYFFYSNLLNFFKEEVHYADGTIVKRENIEYSKDTGEIAWNKEKDFATIKKILSLPQVNIVKKTEEQTVGQNGGLFDNNIVSKKKVVDASKLIPIKSGLSPEKYGGYARPTIAYSVLVIADIEKGKTKKLKRIKEMIGITVQDKKIFESNPIAYLEECGYKNINPNLIIKLPKYSLFEFNGGQRRLLASSIELQKGNELILPYHFTALLYHTQRINKISEPIHKQYVEAHQNEFKELLTTIISLSKKYIQKPNVESLLQQAFEQADKDIYQLSESFISLLKLTSFGAPGAFKFLGVEISQSSVRYKPNSQFLDATLIHQSITGLYETRIDLSKLGED

SEQ ID NO: 177 - protein, 1378 aa, Streptococcus pseudopneumoniae
MSNKPYSIGLDIGTNSVGWAVITDDYKVPSKKMTVLGNTDKHFIKKNLIGALLFDEGTTAEDRRLKRTARRRYTRRKNRLRYLQEIFSGEMSKVDSSFFHRLDDSFLVPEDKRGSKYPIFATLVEEKEYHKQFPTIYHLRKQLADSKEKADLRLIYLVLAHMIKYRGHFLYEEAFDIKNNDIQKIFNEFISIYDNTFEGSSLSGQNAQVETIFTDKISKSAKRERVLKLFPDEKSTGLFSEFLKLIVGNQADFKKHFDLGEKAPLQFSKDTYDEDLENLLGQIGDDFADLFLVAKKLYDAILLSGILTVTDPSTKAPLSASMIERYENHQKDLTTLKQFIKNNLPEKYDEVFSDQSKDGYAGYIDGKTTQEAFYKYIKNLLSKFEGTDYFLEKIEREDFLRKQRTFDNGSIPHQIHLQEMNAILRRQGEHYPFLKENKEKIEKILTFRIPYYVGPLARGNRDFAWLTRNSDQAIRPWNFEEIVDKASSAEDFINKMTNYDLYLPEEKVLPKHSLLYETFAVYNELTKVKFIAEGLRDYQFLDSGQKKQIVNQLFKEKRKVTEKDIIHYLHTVDGYDGIELKGIEKQFNASLSTYHDLLKIIKDKEFMDDSKNEAILENIVHTLTIFEDREMIKQRLAQYDSLFDKKVIKALTRRHYTGWGKLSAKLINGICDKQTGNTILDYLIDDGEINRNFMQLINDDGLSFKKIIQKSQVVGETDDVKQVVRELPGSPAIKKGILQSIKIVDELVKVMDHAPESIVIEMARENQTTARGKKNSQQRYKRIEDSLKILASGLDSNILKENPTDNNQLQNDRLFLYYLQNGKDMYTGEALDINQLSSYDIDHIIPQAFIKDDSLDNRVLTSSKDNRGKSDNVPSLEVVQKRKAFWQQLLDSKLISERKFNNLTKAERERDGLNELDKVGFIKRQLVETRQITKHVAQILDARFNKEVTEKDKKNRNVKIITLKSNLVSNFRKEFRLYKVREINDYHHAHDAYLNAVVAKAILKKYPKLEPEFVYGDYQKNDLKRYISRSKDPKDIEKATEKYFFYSNLLNFFKEEVHYADGTIVKRENIEYSKDTGEIAWNKEKDFATIKKVLSYPQVNIVKKTEEQTVGQNGGLFDNNIVSKEKVVDASKLIPIKSGLSPEKYGGYARPTIAYSVLVIADIEKGKTKKLKRIKEMVGITIQDKKKFEANPIAYLEECGYKNINPNLIIKLPKYSLFEFNGGQRRLLASSIELQKGNELILPYHFTALLYHAQRINKFSEPIHKQYVEAHQNEFKELLTIIISLSKKYIQKPNVESLLHQAFEQADNDIYQLSESFISLLKLTSFGAPGAFKFLGAEISQSSVRYKPNSQFLDTTLIHQSITGLYETRIDLSKLGED

SEQ ID NO: 178 - protein, 1374 aa, Streptococcus pseudoporcinus
MKKRYSYSIGLDIGTNSVGWAVINEDYKVPAKKMTVFGNTDRKTIKKNLLGTVLFDSGETAQARRLKRTNRRRYTRRRYRLCQLQNIFATEMVKVDDTFFQRLSESFFYYQDKAFDKHPIFGNSKEERAYHKTYPTIYHLRKDLADRDQKADLRLIYLALSHIIKFRGHFLIEGKLNSENTDVQKLFIALVTVYNLLFEEEPIAGETCDAKALLTAKTSKSKRLESLISEFPGQKKNGLFGNLLALALGLRPNFKSNFGLSEDAKLQITKDTYEEELDNLLAEIGDHYADLFLAAKNLSDAILLSDILTLSDENTRAPLSASMIKRYEEHQEDLALLKKLVKEQMPEKYWEIFSNAKKNGYAGYIEGKVSQEDFYRYIKPILSRLKGGDEFLAKIDRDDFLRKQRTFDNGSIPHQIHLKELHAILRRQEKYYPFLAEQKEKIEQLLCFRIPYYVGPLAKGGNSSFAWLKRRSDEPITPWNFKDVVDEEASAQAFIEGMTNYDTYLPEEKVLPKHSPLYEMFTVYNELTKVKYIAENMTKPLYLSAEQKEAIIDHLFKQTRKVTVKDLKEKYFSQIEGLENVDVTGVEGAFNASLGTYNDLLKIIKDKAFLDDEANAEILEEIVLILTLFQDEKLIEKRLAKYANLFEKSVLKKLRKRHYRGWGRLSRQLIDGMKDKASGKTILDFLKADDFANRNFIQLINDSSLDFEKLIDDAQKKAIKRESLTEAVANLAGSPAIKKGILQSLKVVDEIVKVMGHNPDNIVIEMSRENQTTAQGLKNARQRLKKIKEVHKKTGSRILEDNSERITNLTLQDNRLYLYLLQDGKDMYTGQDLDINNLSQYDIDHIIPQSFIKDNSIDNLVLTTQKANRGKSDNVPSIEVVRDMKDRVWRRQLANGAISRQKFDHLTKAERGGLADSDKARFLRRQLVETRQITKHVAQLLDSRFNSKSNQNKKLARNVKIITLKSKIVSDFRKDFGLYKLREVNNYHHAHDAYLNAVVGTALLKKYPKLEAEFVYGDYKHFDLVKLISKSDPSLGKATAKVFFYSNIMNFFKEELSLADGTLMKRPVIETNTETGEVVWDKVKDFKTIRKVLSYPQVNIVKKTEIQSGAFSKESVLSKGNSDKLIERKKGWDPKKYGGFDSPNTAYSIFVVAKVAKRKAQKLKTVKEIVGITIMEQAEYEKDNIAFLEKKGYQDIQEKLLIKLPKYSLFELENGRRRLLASANEFQKGNELALSGKYMKFLYLASRYDKLSSKIESEQQKKLFVEQHLHYFDEILDIVVKHATCYIKAENNLKKIISLYKKKEAYSINEQALNMLNLFIFTSLGAPSTFVFFDETIDRKRYTTSSDVLNGILIQQSITGLYETRIDLSRFGGD

SEQ ID NO: 179 - protein, 1326 aa, Streptococcus pseudoporcinus
MLGTVLFDSGETAQARRLKRTNRRRYTRRRYRLCQLQNIFATEMVKVDDTFFQRLSESFFYYQDKAFDKHPIFGNSKEERAYHKTYPTIYHLRKDLADRDQKADLRLIYLALSHIIKFRGHFLIEGKLNSENTDVQKLFIALVTVYNLLFEEEPIAGETCDAKALLTAKTSKSKRLESLISEFPGQKKNGLFGNLLALALGLRPNFKSNFGLSEDAKLQITKDTYEEELDNLLAEIGDHYADLFLAAKNLSDAILLSDILTLSDENTRAPLSASMIKRYEEHQEDLALLKKLVKEQMPEKYWEIFSNAKKNGYAGYIEGKVSQEDFYRYIKPILSRLKGGDEFLAKIDRDDFLRKQRTFDNGSIPHQIHLKELHAILRRQEKYYPFLAEQKEKIEQLLCFRIPYYVGPLAKGGNSSFAWLKRRSDEPITPWNFKDVVDEEASAQAFIEGMTNYDTYLPEEKVLPKHSPLYEMFTVYNELTKVKYIAENMTKPLYLSAEQKEAIIDHLFKQTRKVTVKDLKEKYFSQIEGLENVDVTGVEGAFNASLGTYNDLLKIIKDKAFLDDEANAEILEEIVLILTLFQDEKLIEKRLAKYANLFEKSVLKKLRKRHYRGWGRLSRQLIDGMKDKASGKTILDFLKADDFANRNFIQLINDSSLDFEKLIDDAQKKAIKRESLTEAVANLAGSPAIKKGILQSLKVVDEIVKVMGHNPDNIVIEMSRENQTTAQGLKNARQRLKKIKEVHKKTGSRILEDNSERITNLTLQDNRLYLYLLQDGKDMYTGQDLDINNLSQYDIDHIIPQSFIKDNSIDNLVLTTQKANRGKSDNVPSIEVVRDMKDRVWRRQLANGAISRQKFDHLTKAERGGLADSDKARFLRRQLVETRQITKHVAQLLDSRFNSKSNQNKKLARNVKIITLKSKIVSDFRKDFGLYKLREVNNYHHAHDAYLNAVVGTALLKKYPKLEAEFVYGDYKHFDLVKLISKSDPSLGKATAKVFFYSNIMNFFKEELSLADGTLMKRPVIETNTETGEVVWDKVKDFKTIRKVLSYPQVNIVKKTEIQSGAFSKESVLSKGNSDKLIERKKGWDPKKYGGFDSPNTAYSIFVVAKVAKRKAQKLKTVKEIVGITIMEQAEYEKDNIAFLEKKGYQDIQEKLLIKLPKYSLFELENGRRRLLASANEFQKGNELALSGKYMKFLYLASRYDKLSSKIESEQQKKLFVEQHLHYFDEILDIVVKHATCYIKAENNLKKIISLYKKKEAYSINEQALNMLNLFIFTSLGAPSTFVFFDETIDRKRYTTSSDVLNGILIQQSITGLYETRIDLSRFGGD

SEQ ID NO: 180 - protein, 1370 aa, Streptococcus sanguinis
MKKPYSIGLDIGTNSVGWAVVTDDYKVPAKKMRVFGDTDRSHIKKNLLGTLLFDDGNTAESRRLKRTARRRYTRRRNRILYLQEIFTESMNEIDESFFHRLDDSFLVPEDKRGSKYPIFATLQEEKEYHKQFPTIYHLRKQLADSKEKSDVRLIYLALAHMIKYRGHFLYEETFDIKNNDIQKIFNEFINIYDNTFEGSSLSGQNAQVEAIFTDKISKSAKRERVLKLFPDEKSTGLFSEFLKLIVGNQADFKKHFDLEEKAPLQFSKDTYDEELENLLGQIGDDFADLFLIAKKLYDAILLSGILTVTDPSTKAPLSASMIERYENHQKDLAALKQFIKNNLPEKYVEVFSDQSKDGYAGYIDGKTTQEAFYKYIKNLLSKFEGADYFLDKIEREDFLRKQRTFDNGSIPHQIHLQEMNAILRRQGEHYPFLKENREKIEKILTFRIPYYVGPLARDNRDFSWLTRNSDEPIRPWNFEEVVDKARSAEDFIHRMTNYDLYLPEEKVLPKHSLLYETFAVYNELTKVKFIAEGLRDYQFLDSGQKKQIVNQLFKEKRKVTEKDIIHYLHNVDGYDGIELKGIEKQFNANLSTYHDLLKITKDKEFMDDPKNEEILENIVHTLTIFEDREMIKQRLAQYDTLFDEKVIKALTRRHYTGWGKLSAKLINGIRDKQSGKTILDYLIDDDKINRNFMQLINDDGLSFKEIIQKAQVVGKTDDVKQVVQELPGSPAIKKGILQSIKIVDELVKVMGYALESIVIEMARENQTTARGKKNSQQRYKRIEDALKNLAPGLDSNILKENPTDNIQLKNDRLFLYYLQNGKDMYTGKPLDINQLSSYDIDHIIPQAFIKDDSIDNRVLTSSKDNRGKSDNVPSLEVVQKRKAFWQQLLDSKLISERKFNNLTKAERGGLDERDKVGFIRRQLVETQQITKNVAQILDARFNTEVKEKNQKIRTVKIITLKSNLVSNFRKEFGLYKVREINNYHHAHDAYLNAVVAKAILKKYPKLEPEFVYGDYQKYDLKKYISRFKPSKEIEKATEKYFFYSNLLNFFKEEVLYADGTIRKRENIEYSKDTGEIAWDKEKDFATIKKVLSYPQVNIVKKREVQTGGFSKESILPKGNSDKLIPRKTKDILWDTTKYGGFDSPVIAYSILLIADIEKGKAKKLKTVKTLVGITIMEKAAFEENPITFLENKGYHNVRKENILCLPKYSLFELENGRRRLLASAKELQKGNEIVLPVCLTTLLYHSKNLHKLDEPEHLEYIQKHRNEFKDLLNLVSEFSQKYILAEANLEKIKDLYADNEQADIEILANSFINLLTFTALGAPAAFKFFGKDVDRKRYTTVSEILNATLIHQSITGLYETRIDLSKLGEE

SEQ ID NO: 181 - protein, 1377 aa, Streptococcus sanguinis
MKKPYSIGLDIGTNSVGWAVITDDYKVPSKKMKVLGNTDKHFIKKNLIGALLFDEGTTAEDRRLKRTSRRRYTRRKNRLRYLQEIFSEEISKLDSSFFHRLDDSFLVPEDKRGSKYPIFATLEEEKEYHKKFPTIYHLRKHLADSKEKTDLRLIYLALAHMIKYRGHFLYEESFDIKNNDIQKIFNEFISIYDNTFEGSSLSGQNAQVEAIFTDKISKSTKRERVLKLFSDEKSTGLFSEFLKLIVGNQADFKKHFDLEEKAPLQFSKDTYDEDLENLLGQIGDGFADLFLVAKKLYDAILLSGILTVTDPSTKAPLSASMIERYENHQEDLAALKQFIKNNLSEKYAEVFSDQSKDGYAGFIDGKTTQEAFYKYIKNLLSKLEGADYFLNKIEREDFLRKQRTFDNGSIPHQIHLQEMNAILRRQGEHYLFLKENREKIEKILAFRIPYYVGPLARGNRDFAWLTRNSDQAIRPWNFEEVVDKASSAEDFINKMTNYDLYLPEEKVLPKHSLLYETFAVYNELTKVKFIAEGLRDYQFLDSGQKKQIVNQLFKDKRKVTEKDIIHYLHNVDGYDGIELKGIEKQFNASLSTYHDLLKIIKDKEFMDNPKNGEILENIIHTLTIFEDREMIKQRLAQYDTLFDEKVIKALTRRHYTGWGKLSAKLINGIRDKQTGKTILEYLIDDGDCNRNFMQLINDDGLSFKEIIQKAQVVGKTDDVKQVVQEIPGSPAIKKGILQSIKIVDELVKVMGHNPESIVIEMARENQTTAKGKKNSQQRYKRIEDALKNLAPGLDSNILKENPTDNIQLQNDRLFLYYLQNGKDMYTGKAIDINQLSNYDIDHIIPQAFIKDDSLDNRVLTSSKDNRGKSDNVPSIEVVQKRKAFWQQLLDSKLISERKFNNLTKAKRGGLDERDKVGFIKRQLVETRQITKHVAQLLDTRFNTEVNEENQKIRTVKIITLKSNLVSNFRKEFGLYKVREINDYHHAHDAYLNAVVAKAILKKYPKLEPEFVYGDYQKYDLKRYILKSKASNTIDKATEKYFFYSNLLNFFKEKVRYADGTIKKRENIEYSNDTGEIAWNKEKDFATIKKVLSLPQVNIVKKTEEQTVGQNGGLFDNNIVSKKKVVDASKLIPIKSSLSPEKYGGYARPTIAYSVLVIADIEKGKGKAKKLKRIKEIVGITIQDKKKFESNPVTYLEECGYKNINSNLIIKLPKYSLFEFNDGQRRLLASSIELQKGNELILPYHLTALLYHAQRINKISEPIHKQYVEAHQNEFKELLTTIISLSKKYIQKPNVELLLQQAFDQADKDIYQLSESFISLLKLTSFGAPGAFKFLGVEISQSSVRYKPNSQFLDTTLIHQSITGLYETRIDLSKLGED

SEQ ID NO: 182 - protein, 1371 aa, Streptococcus sp.
MENKNYSIGLDIGTNSVGWSVITDDYKVPSKKMKVLGNTDKHFIKKNLIGALLFDEGTTAEARRLKRTARRRYTRRKNRLRYLQEIFSEEIGKVDSSFFHRLDDSFLIPEDKRGSKYPIFATLAEEKKYHKQFPTIYHLRKQLADSKEKTDLRLIYLALAHMIKYRGHFLYEEAFDIKNNDIQKIFNEFISIYNNTFEGNSLSGQNVQVEAIFTDKISKSAKRERVLKLFPDEKSTGLFSEFLKLIVGNQADFKKHFDLEEKAPLQFSRDTYDEDLENLLGQIGDDFADLFLVAKKLYDAILLSGILTVTNPSTKAPLSASMIERYENHQKDLASLKQFIKNNLPEKYDEVFSDQSEDGYAGYIDGKTTQETFYKYIKNLLSKFEGADYFLDKIEREDFLRKQRTFDNGSIPHQIHLQEMNAILRRQGEHYPFLKENKEKIEKILTFRIPYYVGPLARGNRDFAWLTRNSDQAIRPWNFEEIVDKASSAEDFINKMTNYDLYLPEEKVLPKHSLLYETFAVYNELTKVKFIAEGLRDYQFLDSGQKKQIVTQLFKEKRKVTEKDIIQFLHNVDGYDGIELKGIEKQFNASLSTYHDLLKIIKDKAFMDDAKNEAILENIVHTLTIFEDREMIKQRLAQYDSLFDEKVIKALTRRHYTGWGKLSAKLINGISDKQTGNTILDYLIDDGEINRNFMQLINDDGLSFKEIIQKAQVVGKTNDVKQVVQELPGSPAIKKGILQSIKIVDELVKVMGHAPESIVIEMARENQTTARGKKNSQQRYKRIEDSLKILASGLNSKILKEHPTDNIQLQNDRLFLYYLQNGKDMYTGEALDINQLSSCDIDHIIPQAFIKDDSLDNRVLTSSKDNRGKSDNVPSLEVVDKMKVFWQQLLDSKLISYRKFNNLTKAERGGLNELDKVGFIKRQLVETRQITKHVAQILDARFNKEVTEKDKKNRTVKIITLKSNLVSNFRKEFELYKVREINDYHHAHDAYLNAVVAKAILKKYPKLEPEFVYGDYQKYDLKRYISRSKDPKEIEKATEKYFFYSNLLNFFKEEVHYADGTIVKRENIEYSKDTGEIAWNKEKDFATIKKVLSLPQVNIVKKREVQTGGFSKESILPKGNSDKLIPRKTKDILWDTTKYGGFDSPVIAYSILLIADIEKGKAKKLKTVKTLVGITIMEKDAFEKNPIAFLENKGYHNVCKENILCLPKYSLFELENGRRRLLASAKELQKCNEIVLPVYLTTLLYHSKNVHKLDEPGHLEYIQKHRNEFKDLLNLVSEFSQKYVLADANLEKIKNLYADNEQADIEILANSFINLLTFTALGAPAAFKFFGKDVDRKRYTTVSEILNATLIHQSITGLYETRIDLSKLGED

SEQ ID NO: 183 - protein, 1361 aa, Streptococcus varani
MKKPYSIGLDIGTNSVGWSVVTDDYKVPAKKMKVLGNTDKEYIKKNLIGALLFDSGETAEATRMKRTARRRYTRRRNRILYLQDIFSPELNQVDESFLHRLDDSFLVAEDKRGERHVIFGNIADEVKYHKEFPTIYHLRKHLADSSEKADLRLVYLALAHIIKYRGHFLIDEPIDIRNMNSQNLFKEFLLAFDGIQVDCYLASKHTDISGIITAKISKSRKVEAVLEQFPDQKKNSFFGNMVSLVFGLMPNFKSNFELDEDAKLQFSRDSYDEDLENLLGIIGDEYADVFVAAKKVYDSILLSGILTTNNHSTKAPLSASMIDRYDEHNSDKKLLRDFIRTNIGKEVFKEVFYDTSKNGYAGYIDGKTNQEDFYKYLKNLLQKVDGGDYFIEKIEREDFLRKQRTFDNGSIPHQVHLDEMKAILRRQGEFYPFLKENAEKIQQILTFKIPYYVGPLARGNSRFAWASYNSNEKMTPWNFDNVIDKTSSAQAFIERMTNNDLYLPDQKVLPKHSLLYQKFAVYNELTKIKYVTETGEARLFDVFLKKEIFDGLFKKERKVTKKKILNFLDKNFDEFRITDIQGLDNETGNFNASYGTYHDLLKIIGDKEFMDSSDNVDVLEDIVLSLTLFEDREMIKQRLLKYEDIFSKKVIANLTRRHYTGWGRLSAKLINGIKDKHSRKTILDYLIDDGHSNRNFMQLINDDNLSFKDEIANSQVIGDGDDLHQVVQELAGSPAIKKGILQSLKIVDELVKVMGYNPEQIVVEMARENQTTARGRNNSQQRLGSLTKAIQDFGSDILKRYPVENNQLQNDQLYLYYLQNGKDMYTGDTLDIHNLSQYDIDHIIPQSFIKDNSLDNRVLTNSKSNRGKSDNVPSNEVVKRMKGFWLKQLDAKLISQRKFDNLTKAERGGLSAEDKAGFIKRQLVETRQITKHVARILDERFNRDFDKNDKRIRNVKIVTLKSNLVSNFRKEFGFYKVREINNFHHAHDAYLNAVVAKALLIRYPKLEPEFVYGEYPKYNSYRERKSATEKMFFYSNIMNMFKTTIKLADGRVVEKPVIEANEETGEIAWDKTKHFANVKKVLSYPQVSIVKKVEEQTGGFSKESILPKGGSDKLIARKTKNNYLSTQKYGGFDSPTVAYSIMFVADIEKGKSKRLKTVKEMIGITIMERSRFESNSVTFLEEKGYRNIRENTIIKFPKYSLFELENGRRRLLASAIELQKGNEMFLPQQFVNLLYHAQHANKEDSVIYLEKHRHELSELFHHIIGVSEKTILKPKVEMTLNEAFEKHFEFDEVSELAQSFISLLKFTAFGAPGGFKFLDADIKQSNLRYQTVTEVLSSTLIHQSVTGLYETRIDLSKLGGE

SEQ ID NO: 184 - protein, 1375 aa, Streptococcus sp.
MSNKSYSIGLDIGTNSVGWAVITDDYKVPSKKMKVLGNTDKHFIKKNLIGALLFDEGTTAEDRRLKRTARRRYTRRKNRLRYLQEIFSQEISKVDSSFFHRLDDFFLVPEDKRGSKYPIFATLVEEKEYHKKFPTIYHLRKHLADSKEKTDLRLIYLALAHMIKYRGHFLYEESFDIKNNDIQKIFSEFISIYDNTFEGKSLSGQNAQVEAIFTDKISKSTKRERVLKLFPDEKSTGLFSEFLKLIVGNQADFKKHFDLEEKAPLQFSKDTYDEDLENLLGQIGDDFADLFLVAKKLYDAILLSGILTVKDLSTKAPLSASMIERYENHQKDLAALKQFIQNNLQEKYDEVFSDQSKDGYAGYIDGKTTQEAFYKYIKNLLSKFEGADYFLDKIEREDFLKKQRTFDNGSIPHQIHLQEMNAIIRRQGEHYPFLQENKEKIEKILTFRIPYYVGPLARGNGDFAWLTRNSDQAIRPWNFEEIVDQASSAEDFINKMTNYDLYLPEEKVLPKHSLLYETFAVYNELTKVKFIAEGLTRYQFLDKKQKKDIFDTFFKAENKRKVTEKDIIHYLHNVDGYDGIELKGIEKQFNASLSTYHDLLKIIKDKAFMDDSKNEEILENIIHTLTIFEDREMIKQRLAQYDSLFDEKVIKALTRRHYTGWGKLSAKLINGIRDKKSGKTILDYLIDDGEINRNFMQLIHDDGLSFKEIIQKAQVFGKTNDVKQVVQELPGSPAIKKGILQSIKIVDELVKVMGHAPESIVIEMARENQTTARGKKNSQQRYKRIEDSLKNLASGLDSNILKENPTDNIQLQNDRLFLYYLQNGRDMYTGKPLEINQLSNYDIDHIIPQAFIKDDSLDNRVLTSSKDNRGKSDNVPSLEVVEKMKAFWQQLLDSKLISERKFNNLTKAERERGGLNELDKVGFIKRQLVETRQITKHVAQFLDARFNKEVTEKDKKNRNVKIITLKSNLVSNFRKEFGLYKVREINDYHHAHDAYLNAVLAKAILKKYPKLEPEFVYGDYQKYDLQRYISKSREPKEVEKATQKYFFYSNLLNFFKEEVHYADGTIVKRENIEYSKDTGEIAWNKEKDFATVKKVLSLPQVNIVKKTEVQTGGFSKESILPKGNSDKLIPRKTKEILWDTTKYGGFDSPVIAYSILLIADIEKGKAKKLKTVKTLVGITIMEKATFEKNPITFLENKGYHNVRKENILCLPKYSLFELESGRRRMLASAKELQKGNEIVLPVYLTTLLYHSKNVHKLDEPEHLEYIQKHRYEFKDLLNLVSEFSQKYVLADANLEKIKNLYADNEQADIEILANSFINLLTFTALGAPAAFKFLGKDVDRKRYTTVSEILNATLIHQSITGLYETRIDLSKLGED

SEQ ID NO: 185 - protein, 1371 aa, Streptococcus sp.
MNNNNYSIGLDIGTNSVGWAVITDDYKVPSKKMRVLGNTDKRFIKKNLIGALLFDEGTTAEDRRLKRTARRRYTRRKNRLRYLQEIFAEEMSKVDSSFFHRLDDSFLVPEDKSGSKYPIFATLAEEKEYHKKFPTIYHLRKHLADSKEKADLRLIYLALAHITKYRGHFLYEEAFDIKNNDIQKIFNEFINIYDNTFEGSSLSGQNAQVEAIFTGKISKSVKREHVLKLFPDEKSTGLFSEFLKLIVGNQADFKKHFDLEEKASLQFSKDTYDEDLENLLGQIGDDFADLFLVAKKLYDAILLSGILTVTDPSTKAPLSASMIERYENHQEDLAALKQFIKNNLPEKYAEVFSDQSKDGYAGYIDGKTTQEAFYKYIKNLLSKFEGADYFLDKIEREDFLRKQRTFDNGSIPHQIHLQEMNAILRRQGEHYPLLKENKEKIEKILTFRIPYYVGPLARGNRDFAWLTRNSDQAIRPWNFEEIVDKASSAESFINKMTNYDLYLPEEKVLPKHSLLYETFAVYNELTKVKFIAEGLRDYQFFDSGQKKQIVNQLFKEKRKVTEKDIIHYLHNVDGYDGIELKGIEKQFNASLSTYHDLLKIIKDKEFMDNHKNQEILENIVHTLTIFEDREMIKQRLAQYDSIFDEKVIKALTRRHYTGWGKLSAKLINGICDKKTGKTILDYLIDDGYNNRNFMQLINDDGLSFKEIIQKAQVVGKTDDLTQVVRELSGSPAIKKGILQSIKIVDELVKIMGYAPESIVIEMARENQTTAKGKKNSQQRYKRIEDALKNLAPGLDSTISKENPTDNIQLQNDRLFLYYLQNGKDMYTGEALDINQLSSYDIDHIIPQAFIKDDSLDNRVLTSSKDNRGKSDNVPSLEVVKKRKAFWQQLLDSKLISERKFNNLTKAERGGLDERDKVGFIKRQLVETRQITKHVARILDARFNTEVSEKNQKIRSVKIITLKSNLVSNFRKEFKLYKVREINDYHHAHDAYLNAVVAKAILKKYPKLEPEFVYGDYQKYDLKRYISKSKDPKEVEKATEKYFFYSNLLNFFKEEVHYADGTIVKRENIEYSKDTGEIAWNKEKDFVTIKKVLSYPQVNIVKKREVQTGGFSKESILPKGNSDKLIPRKTKDILWDTTKYGGFDSPVIAYSILLIADIEKGKAKKLKTVKTLVGITIMEKAAFEKNPITFLENKGYHNVRKENILCLPKYSLFELENGRRRLLASAKELQKGNEIVLPVYLTTLLYHSKNVHKLDEPEHLEYIQKHRYEFKDLLNLVSEFSQKYVLAEANLEKIKSLYVDNEQADIEILANSFINLLTFTALGAPAAFKFFGKDVDRKRYTTVSEILNATLIHQSITGLYETRIDLSKLGED

SEQ ID NO: 186 - protein, 1364 aa, Streptococcus suis
MKKKYAIGIDIGTNSVGWSVVTDDYKVPSKKMKVFGNTEKRYIKKNLLGTLLFDEGNTAENRRLKRTARRRYTRRRNRILYLQEIFAEEINKIDDSFFQRLDDSFLIVEDKQGSKHPIFGTLQEEKKYHKQFPTIYHLRKQLADSSQKADIRLIYLALAHIIKYRGHFLFEGDLKSENKDVQHLFNDFVEMFDKTVEGSYLSENLPNVADVLVEKVSKSRRLENILHYFPNEKKNGLFGNFLALALGLQPNFKTNFELAEDAKIQFSKETYEEDLEELLGKIGDDYADLFIATKSLYDGILLAGILSTTDSTTKAPLSSSMVNRYEEHKKDLALLKNFIHQNLSDSYKEVFNDKLKDGYAGYIEGKTTQENFYRFIKKAIEKIEGSDYFIDKIDREDFLRKQRTFDNGSIPHQIHLQEMHAIIRRQAEFYPFLVENQDKIEKILTFRIPYYVGPLARGKSEFAWLNRKSDEKIRPWNFDEMVDKETSAENFITRMTNYDQYLPDQKVLPKHSLLYEKFAVYNELTKVKFIAEGMRDYQFLDSGQKKDIVKTLFKTKRKVTAKDIKAYLENSNGYAGVELKGLEEQFNASLPTYHDLLKILRDKAFIDAEENQEILEDIVLTLTLFEDREMIRKRLEKYKDILTEEQRKKLERRHYTGWGRLSAKLINGILDKVTRKTILGYLIDDGTSNRNFMQLINDDTLSFVDEIRLAQGSGEAEDYRAEVQNLAGSPAIKKGILQSLKIVDELIEVMGYDPEHIVVEMARENQFTNQGRRNSQQRYKKIENAIKNLDSNLNSKILKEYPTNNQALQNDRLFLYYLQNGKDMYTDEELDIDQLSQYDIDHIIPQAFIKDDSLDNKVLTKSAKNRGKSDDVPSLEIVHKKKNFWKQLLDSQLISQRKFDNLTKAERGGLTNEDKARFIQRQLVETRQITKHVARILDTRFNTKLDEAGNRIRDPKVNIITLKSNLVSQFRKDYQLYKVREINNYHHAHDAYLNAVVATALLKKYPQLAPEFVYGDYPKYNSYKSRKSATEKVLFYSNIMNFFRRVLVYSKTGEVRIRPVIEVNKETGEIVWDKKSDFRTVRKVLSYPQVNVVKKVEMQTGGFSKESILQHGDSDKLIPRKTEKFYLDTKKYGGFDSPTIAYSVLLIADIEKGKAKKLKRVKELIGITIMERMAFEKNPIEFLEHKGYKNILEKNIIKLPKYSLFELENGRRRLLASAKELQKGNEMILPPHLVTLLYHSSNIHKITEPIHLNYVNKNKHEFKELLRHISDFSTRYILAQDRLSKIEELYDKNDGDDISDLTSSFVNLLTFTAIGAPAAFKFLGSVIDRKRYTSIAEILEATLIHQSVTGLYETRIDLSKLGGD

SEQ ID NO: 187 - protein, 1366 aa, Streptococcus suis
MKKKYAIGIDIGTNSVGWSVVTDDYKVPSKKMKVFGNTEKRYIKKNLLGTLLFDEGNTAENRRLKRTARRRYTRRRNRILYLQEIFAEEINKIDDSFFQRLDDSFLIVEDKQGSKHPIFGTLQEEKEYHKQFPTIYHLRKQLADSSQKADIRLIYLALAHIIKYRGHFLFEGDLKSENKDVQHLFNDFVEMFDKTVEGSYLSENLPNVADVLVEKVSKSRRLENILHYFPNEKKNGLFGNFLTLALGLQPNFKTNFELAEDAKIQFSKETYEEDLEELLGKIGDDYADLFIATKSLYDGILLAGILSTTDSTTKAPLSSSMVNRYEEHQKDLALLKNFIHQNLSDSYKEVFNDKLKDGYAGYIEGKTTQENFYRFIKKAIEKIEGSNYFIDKIDREDFLRKQRTFDNGSIPHQIHLQEMHAIIRRQAEFYPFLVENQDKIEKILTFRIPYYVGPLARGKSEFAWLNRKSDEKIRPWNFDEMVDKETSAENFITRMTNYDQYLPDQKVLPKHSLLYEKFAVYNELTKVRYVTEQGKSFFFDANMKQEIFDGVFKVYRKVTKEKLMDFLGKEFDEFRIVDLLGLDKDNKSFNASLGTYHDLKKIVSKDLLDNPENEDILENVVLTLTLFEDREMIRKRLEKYKDVLTEEQRKKLERRHYTGWGRLSAKLINGIRDKVTRKTILDYLIDDGTSNRNFMQLINDDTLSFVDEIRLAQGSGEAEDYRAEVQNLAGSPAIKKGILQSLKIVDELIEVMGYDPEHIVVEMARENQFTNQGRRNSQQRYKKIENAIKNLDSNLNSKILKEYPTNNQALQNDRLFLYYLQNGKDMYTDEELDIDQLSQYDIDHIIPQAFIKDDSLDNKVLTKSAKNRGKSDDVPSLEIVHKKKNFWKQLLDSQLISQRKFDNLTKAERGGLTNEDKARFIQRQLVETRQITKHVARILDTRFNTKLDEAGNRIRDPKVNIITLKSNLVSQFRKDYQLYKVREINNYHHAHDAYLNAVVATALLKKYPQLAPEFVYGDYPKYNSYKSRKSATEKVLFYSNIMNFFRRVLVYSKTGEVRIRPVIEVNKETGEIVWDKKSDFRTVRKVLSYPQVNVVKKVEMQTGGFSKESILQHGDSDKLIPRKTEKFYLDTKKYGGFDSPTIAYSVLLIADIEKGKAKKLKRVKELIGITIMERMAFEKNPIEFLEHKGYKNILEKNIIKLPKYSLFELENGRRRLLASAKELQKGNEMILPPHLVTLLYHSSNIHKITEPIHLNYVNKNKHEFKELLRHISDFSTRYILAQDRLSKIEELYDKNDGDDISDLTSSFVNLLTFTAIGAPAAFKFLGSVIDRKRYTSIAEILEATLIHQSVTGLYETRIDLSKLGGD

SEQ ID NO: 188 - protein, 1366 aa, Streptococcus suis
MKKKYAIGIDIGTNSVGWSVVTDDYKVPSKKMKVFGNTEKRYIKKNLLGTLLFDEGNTAENRRLKRTARRRYTRRRNRILYLQEIFAEEINKIDDSFFQRLDDSFLIVEDKQGSKHPIFGTLQEEKEYHKQFPTIYHLRKQLADSSQKADIRLIYLALAHIIKYRGHFLFEGDLKSENKDVQHLFNDFVEMFDKTVEGSYLSENLPNVADVLVEKVSKSRRLENILHYFPNEKKNGLFGNFLALALGLQPNFKTNFELAEDAKIQFSKETYEEDLEELLGKIGDDYADLFIATKSLYDGILLAGILSTTDSTTKAPLSSSMVNRYEEHQKDLALLKNFIHQNLSDSYKEVFNDKLKDGYAGYIEGKTTQENFYRFIKKAIEKIEGSNYFIDKIDREDFLRKQRTFDNGSIPHQIHLQEMHAIIRRQAEFYPFLVENQDKIEKILTFRIPYYVGPLARGKSEFAWLNRKSDEKIRPWNFDEMVDKETSAENFITRMTNYDQYLPDQKVLPKHSLLYEKFAVYNELTKVRYVTEQGKSFFFDANMKQEIFDGVFKVYRKVTKEKLMDFLGKEFDEFRIVDLLGLDKDNKSFNASLGTYHDLKKIVSKDLLDNPENEDILENVVLTLTLFEDREMIRKRLEKYKDVLTEEQRKKLERRHYTGWGRLSAKLINGIRDKVTRKTILDYLIDDGTSNRNFMQLINDDTLSFVDEIRLAQGSGEAEDYRAEVQNLAGSPAIKKGILQSLKIVDELIEVMGYDPEHIVVEMARENQFTNQGRRNSQQRYKKIENAIKNLDSNLNSKILKEYPTNNQALQNDRLFLYYLQNGKDMYTDEELDIDQLSQYDIDHIIPQAFIKDDSLDNKVLTKSAKNRGKSDDVPSLEIVHKKKNFWKQLLDSQLISQRKFDNLTKAERGGLTNEDKARFIQRQLVETRQITKHVARILDTRFNTKLDEAGNRIRDPKVNIITLKSNLVSQFRKDYQLYKVREINNYHHAHDAYLNAVVATALLKKYPQLAPEFVYGDYPKYNSYKSRKSATEKVLFYSNIMNFFRRVLVYSKTGEVRIRPVIEVNKETGEIVWDKKSDFRTVRKVLSYPQVNVVKKVEMQTGGFSKESILQHGDSDKLIPRKTEKFYLDTKKYGGFDSPTIAYSVLLIADIEKGKAKKLKRVKELIGITIMERMAFEKNPIEFLEHKGYKNILEKNIIKLPKYSLFELENGRRRLLASAKELQKGNEMILPPHLVTLLYHSSNIHKITEPIHLNYVNKNKHEFKELLRHISDFSTRYILAQDRLSKIEELYDKNDGDDISDLTSSFVNLLTFTAIGAPAAFKFLGSVIDRKRYTSIAEILEATLIHQSVTGLYETRIDLSKLGGD

SEQ ID NO: 189 - protein, 1364 aa, Streptococcus suis
MKKKYAIGIDIGTNSVGWSVVTDDYKVPSKKMKVFGNTEKRYIKKNLLGTLLFDEGNTAENRRLKRTARRRYTRRRNRILYLQEIFAEEINKIDDSFFQRLDDSFLIVEDKQGSKHPIFGTLQEEKKYHKQFPTIYHLRKQLADSSQKADIRLIYLALAHIIKYRGHFLFEGDLKSENKDVQHLFNDFVEMFDKTVEGSYLSENLPNVADVLVEKVSKSRRLENILHYFPNEKKNGLFGNFLALALGLQPNFKTNFELAEDAKIQFSKETYEEDLEELLGKIGDDYADLFIATKSLYDGILLAGILSTTDSTTKAPLSSSMVNRYEEHKKDLALLKNFIHQNLSDSYKEVFNDKLKDGYAGYIEGKTTQENFYRFIKKAIEKIEGSDYFIDKIDREDFLRKQRTFDNGSIPHQIHLQEMHAIIRRQAEFYPFLVENQDKIEKILTFRIPYYVGPLARGKSEFAWLNRKSDEKIRPWNFDEMVDKETSAENFITRMTNYDQYLPDQKVLPKHSLLYEKFAVYNELTKVKFIAEGMRDYQFLDSGQKKDIVKTLFKTKRKVTAKDIKAYLENSNGYAGVELKGLEEQFNASLPTYHDLLKILRDKAFIDAEENQEILEDIVLTLTLFEDREMIRKRLEKYKDILTEEQRKKLERRHYTGWGRLSAKLINGILDKVTRKTILGYLIDDGTSNRNFMQLINDDTLSFVDEIRLAQGSGEAEDYRAEVQNLAGSPAIKKGILQSLKIVDELIEVMGYDPEHIVVEMARENQFTNQGRRNSQQRYKKIENAIKNLDSNLNSKILKEYPTNNQALQNDRLFLYYLQNGKDMYTDEELDIDQLSQYDIDHIIPQAFIKDDSLDNKVLTKSAKNRGKSDDVPSLEIVHKKKNFWKQLLDSQLISQRKFDNLTKAERGGLTNEDKARFIQRQLVETRQITKHVARILDTRFNTKLDEAGNRIRDPKVNIITLKSNLVSQFRKDYQLYKVREINNYHHAHDAYLNAVVATALLKKYPQLAPEFVYGDYPKYNSYKSRKSATEKVLFYSNIMNFFRRVLVYSKTGEVRIRPVIEVNKETGEIVWDKKSDFKTVRKVLSYPQVNVVKKVEMQTGGFSKESILQHGDSDKLIPRKTEKFYLDTKKYGGFDSPTIAYSVLLIADIEKGKAKKLKRVKELIGITIMERMAFEKNPIEFLEHKGYKNILEKNIIKLPKYSLFELENGRRRLLASAKELQKGNEMILPPHLVTLLYHSSNIHKITEPIHLNYVNKNKHEFKELLRHISDFSTRYILAQDRLSKIEELYDKNDGDDISDLTSSFVNLLTFTAIGAPAAFKFLGSVIDRKRYTSIAEILEATLIHQSVTGLYETRIDLSKLGGD

SEQ ID NO: 190 - protein, 1386 aa, Streptococcus sp.
MDQKYSIGLDIGTNSVGWAVVTDDYKVPAKKMKVLGNTDKQSIKKNLLGALLFDSGETAEATRLKRTARRRYTRRRNRLRYLQEIFAEEMNKVDENFFQRLDDSFLVDEDKRGERHPIFGNIAAEVKYHDDFPTIYHLRKHLADISQKADLRLVYLALAHMIKFRGHFLIEGQLKAENTNVQALFKDFVEVYDKTVEESHLSEMTVDALSILTEKVSKSRRLENLIAHYPAEKKNTLFGNLIALSLGLQPNFKTNFQLSEDAKLQFSKDTYEEDLEGLLGEIGDEYADLFASAKNLYDAILLSGILTVDDNSTKAPLSASMVKRYEEHQKDLKKLKDFIKVNAPDQYNAIFKDKNKKGYAGYIENGVKQDEFYKYLKGILLQINGSGDFLDKIDREDFLRKQRTFDNGSIPHQIHLQEMHAILRRQEEHYPFLKENQDKIEKILTFRIPYYVGPLARKGSRFAWAEYKADEKITPWNFDDILDKEKSAEKFITRMTLNDLYLPEEKVLPKHSLLYETFTVYNELTKVKYVNEQGEAKFFDANMKQEIFDHVFKENRKVTKDKLLNYLGKEFDEFRIVDLTGLDKENKVFNSSLGTYHDLRKILDKSFLDNKENEQIIEDIIQTLTLFEDREMIRQRLQKYSDIFTKAQLKKLERCHYTGWGRLSYKLINGIRNKENKKTILDYLIDDGYANRNFMQLINDDALSFKEEIAKAQVIGETDDLNQVVSDIAGSPAIKKGILQSLKIVDELVKVMGYNPANIVIEMARENQTTDKGRRNSQQRLKLLQDSLKNLDNPVNIKNVENQQLQNDRLFLYYIQNGKDMYTGETLDINNLSQYDIDHIIPQAFIKDDSFDNRVLTSSSENRGKSDNVPSIEVVRARKADWMRLRKAGLISQRKFDNLTKAERGGLTENDKAGFIKRQLVETRQITKHVAQVLDARFNAKHDENKKVIRDVKIITLKSNLVSQFRKDFKFYKVREINDYHHAHDAYLNAVIGTALLKKYPKLASEFVYGEFKKYDVRKFIAKSDKEIGKATAKYFFYSNLMNFFKKEVKFADGTVVERPDIETSEDGEIAWNKQTDFKIVRKVLSYPQVNIVKKTEVQTHGLDRGKPRGLFNANPSPKPKPDSSENLVGVKRNLDPKKYGGYAGISNSYAVLVKAIIEKGVKKKETMVLEFQGISILDRITFEKDKRAFLLGKGYKDIKKIIELPKYSLFELKDGSRRMLASILSTNNKRGEIHKGNELFVPQKFTTLLYHAKRINNPINKDHIEYVKKHRDDFKELLNYVLEFNEKYVGATKNGERLKEAVADFDSKSNEEICTSFLGAVNSKNAGLFELTSLGSASDFEFLGVKIPRYRDYTPSSLLKDSTLIHQSITGLYETRIDLSKLGED

SEQ ID NO: 191 - protein, 1300 aa, Brochothrix thermosphacta
MWGVSLFEAGKTAAERRGYRSTRRRLNHRKFRLRLLEDMFEKEILSKDPSFFIRLKEAFLSPKDEQKQFKGNILFNDKDYTDADYYEQYKTIYHLRYDLISQHRQFDIREVYLAIHHLIKYRGHFIYEDQTFTTDGNQLQHHIKAIITMINSTLNRIIIPETIDINVFEKILLDRMMNRSSKVKFLIELTGEDKQDKPLLKELFNLIVGLKAKPASIFEQENLATIVETMNMSTEQVQLDLLTLADVLADEEYDLLLTAQKIYSAIILDESMDGYEYFAEAKKESYRKHQEELVLVKKMLKSNAITNDERAKFEYFYTDYIGAKSSNYEESKNIKKGLSAAYGKYSKEERLFKHIELLLAKENVLTTVEHALLEKNITFASLLPLQRSSRNAVIPYQVHEKELVAILENQATYYPFLLEQKDNIHKLLTFRIPYYVGPLADQKDSEFAWMVRKQAGKITPFNFEEMVDIDASSEAFIKRMTNKCTYLIHEDVIPKHSFSYAKFEVLNELNKIRLDGKPIDIPLKKRIFEGLFLEKTKVTQTSLKKWLAEHEHMTVSVVQGTQKETEFATSLQAFHRFVKIFDRETVSNPANEEMFEKIIYWSTVFEDKKIMRRKLSEYPQLTEQQQVQLAQVRFRGWGRLSQRLINRIKTPVSGDEDHKLSINEILWQTNENFMQIIRNKDYLFKKIIEEQFENETALLNKQRIDELAASPANKKGIWQAIKIVKELEKVLQQPAENIFIEFARSDEESKRSTPRDKFIEKAYAQLKKETDTFNLEHLKELKQRSKQLSSQRLFLYFIQNGKCMYSGEHLDIERLDSYEVDHILPQSYIKDNSIENLALVKKVENQRKKDSLLLNSSIINQNYSRWEQLKNAGLIGEKKFRNLTRTKITDRDKEGFIARQLVETRQITKHVTQLLQQEYKDTTKVFAIKATLVSGLRRKFEFIKNRNVNDYHHAQDAFLVAFLGTNITSNYPKIEMEYLFKGYQHYLNEVGKSAAKPKFTFIVENLSKQQYNSTTGEVKWNPEVDIAKLKRILNFKQCNIVRKVEEQSGALFKETIYPVEESSSKTIPLKKHLDTAIYGGYTAVNYASYALIQFKKGRKLKREIIGIPLAVQTRIDNSETSLQAYIAEQIKSEVEILNGRILKYQLISNNGNRLYIAGPSERHNARQLIVSDEAAKVIWLISTKQADEAMFLKYYRLEHLEAVFEELIRKQAADYQIFEKLIKKIEVNKVYFYSCTYNEKVKVIEELLKITQANATNGDLKLLKMSNREGRLGSVSVALDFKIINQSVTGLYQSIEDYNN

SEQ ID NO: 192 - protein, 1329 aa, Catenibacterium mitsuokai
IVDYCIGLDLGTGSVGWAVVDMNHRLMKRNGKHLWGSRLFSNAETAANRRASRSIRRRYNKRRERIRLLRAILQDMVLEKDPTFFIRLEHTSFLDEEDKAKYLGTDYKDNYNLFIDEDFNDYTYYHKYPTIYHLRKALCESTEKADPRLIYLALHHIVKYRGNFLYEGQKFNMDASNIEDKLSDIFTQFTSFNNIPYEDDEKKNLEILEILKKPLSKKAKVDEVMTLIAPEKDYKSAFKELVTGIAGNKMNVTKMILCEPIKQGDSEIKLKFSDSNYDDQFSEVEKDLGEYVEFVDALHNVYSWVELQTIMGATHTDNASISEAMVSRYNKHHDDLKLLKDCIKNNVPNKYFDMFRNDSEKSKGYYNYINRPSKAPVDEFYKYVKKCIEKVDTPEAKQILNDIELENFLLKQNSRTNGSVPYQMQLDEMIKIIDNQAEYYPILKEKREQLLSILTFRIPYYFGPLNETSEHAWIKRLEGKENQRILPWNYQDIVDVDATAEGFIKRMRSYCTYFPDEEVLPKNSLIVSKYEVYNELNKIRVDDKLLEVDVKNDIYNELFMKNKTVTEKKLKNWLVNNQCCSKDAEIKGFQKENQFSTSLTPWIDFTNIFGKIDQSNFDLIENIIYDLTVFEDKKIMKRRLKKKYALPDDKVKQILKLKYKDWSRLSKKLLDGIVADNRFGSSVTVLDVLEMSRLNLMEIINDKDLGYAQMIEEATSCPEDGKFTYEEVERLAGSPALKRGIWQSLQIVEEITKVMKCRPKYIYIEFERSEEAKERTESKIKKLENVYKDLDEQTKKEYKSVLEELKGFDNTKKISSDSLFLYFTQLGKCMYSGKKLDIDSLDKYQIDHIVPQSLVKDDSFDNRVLVVPSENQRKLDDLVVPFDIRDKMYRFWKLLFDHELISPKKFYSLIKTEYTERDEERFINRQLVETRQITKNVTQIIEDHYSTTKVAAIRANLSHEFRVKNHIYKNRDINDYHHAHDAYIVALIGGFMRDRYPNMHDSKAVYSEYMKMFRKNKNDQKRWKDGFVINSMNYPYEVDGKLIWNPDLINEIKKCFYYKDCYCTTKLDQKSGQLFNLTVLSNDAHADKGVTKAVVPVNKNRSDVHKYGGFSGLQYTIVAIEGQKKKGKKTELVKKISGVPLHLKAASINEKINYIEEKEGLSDVRIIKDNIPVNQMIEMDGGEYLLTSPTEYVNARQLVLNEKQCALIADIYNAIYKQDYDNLDDILMIQLYIELTNKMKVLYPAYRGIAEKFESMNENYVVISKEEKANIIKQMLIVMHRGPQNGNIVYDDFKISDRIGRLKTKNHNLNNIVFISQSPTGIYTKKYKL

SEQ ID NO: 193 - protein, 1389 aa, synthetic construct
MDKKYSIGLDIGTNSVGWAVITDEYKVPSKKFKVLGNTDRHSIKKNLIGALLFDSGETAEATRLKRTARRRYTRRKNRICYLQEIFSNEMAKVDDSFFHRLEESFLVEEDKKHERHPIFGNIVDEVAYHEKYPTIYHLRKKLVDSTDKADLRLIYLALAHMIKFRGHFLIEGDLNPDNSDVDKLFIQLVQTYNQLFEENPINASGVDAKAILSARLSKSRRLENLIAQLPGEKKNGLFGNLIALSLGLTPNFKSNFDLAEDAKLQLSKDTYDDDLDNLLAQIGDQYADLFLAAKNLSDAILLSDILRVNTEITKAPLSASMIKRYDEHHQDLTLLKALVRQQLPEKYKEIFFDQSKNGYAGYIDGGASQEEFYKFIKPILEKMDGTEELLVKLNREDLLRKQRTFDNGSIPHQIHLGELHAILRRQEDFYPFLKDNREKIEKILTFRIPYYVGPLARGNSRFAWMTRKSEETITPWNFEEVVDKGASAQSFIERMTNFDKNLPNEKVLPKHSLLYEYFTVYNELTKVKYVTEGMRKPAFLSGEQKKAIVDLLFKTNRKVTVKQLKEDYFKKIECFDSVEISGVEDRFNASLGTYHDLLKIIKDKDFLDNEENEDILEDIVLTLTLFEDREMIEERLKTYAHLFDDKVMKQLKRRRYTGWGRLSRKLINGIRDKQSGKTILDFLKSDGFANRNFMQLIHDDSLTFKEDIQKAQVSGQGDSLHEHIANLAGSPAIKKGILQTVKVVDELVKVMGRHKPENIVIEMARENQTTQKGQKNSRERMKRIEEGIKELGSQILKEHPVENTQLQNEKLYLYYLQNGRDMYVDQELDINRLSDYDVDHIVPQSFLKDDSIDNKVLTRSDKNRGKSDNVPSEEVVKKMKNYWRQLLNAKLITQRKFDNLTKAERGGLSELDKAGFIKRQLVETRQITKHVAQILDSRMNTKYDENDKLIREVKVITLKSKLVSDFRKDFQFYKVREINNYHHAHDAYLNAVVGTALIKKYPKLESEFVYGDYKVYDVRKMIAKSEQEIGKATAKYFFYSNIMNFFKTEITLANGEIRKRPLIETNGETGEIVWDKGRDFATVRKVLSMPQVNIVKKTEVQTGGFSKESILPKRNSDKLIARKKDWDPKKYGGFDSPTVAYSVLVVAKVEKGKSKKLKSVKELLGITIMERSSFEKNPIDFLEAKGYKEVKKDLIIKLPKYSLFELENGRKRMLASAGELQKGNELALPSKYVNFLYLASHYEKLKGSPEDNEQKQLFVEQHKHYLDEIIEQISEFSKRVILADANLDKVLSAYNKHRDKPIREQAENIIHLFTLTNLGAPAAFKYFDTTIDRKRYTSTKEVLDATLIHQSITGLYETRIDLSQLGGDGGSGPPKKKRKVYPYDVPDYA

SEQ ID NO: 194 - protein, 1335 aa, Urinacoccus massiliensis
MKNYTIGLDIGTNSVGWAVIKDDLTLVRKKIKISGNTDKKEVKKNLWGSFLFEQGDTAQDTRVKRIARRRYERRRFRIRELQKIFDKSMGEVDSNFFHRLDESFLVEEDKEYSKYPIFSNEKEDKNYYDKYPTIYHLRKDLADSNQKADLRLIYLALAHMIKYRGHFLIEGDLKMDGISISESFQEFIDSYNEVCALEDENLEIIYNDELLTQIENIFKQDISRSKKLDQAIALFQGVKRQSLFGIFLTLIVGNKANFQKIFNLEDDIKLDLKEEDYDENLEELLSNIDEGYRDVFLQAKNVYNAIELSKILKTDGKETKAPLSAQMVELYNQHREDLKKYKDYIKAYLPEKYGETFKDATKNGYAGYIDGKTSQEDFYKFVKAQLKGEENGEYFLEAIENENFLRKQRSFYNGVIPYQIHLQELTAVLDQQEKHYSFLKENRDKIISLLTFRIPYYVGPLAKGESRFAWLERSNSEEKIKPWNFDKIVDIDKSAELFIENLTSRDTYLPDEPVLPKRSLIYQKFTIFNELTKISYIDERGILQNFSSREKIAIFNDLFKNKSKVTKNQLVKYIENKEQIIAPEIKGIEDSFNSNYSTYIDLSKIPDMKKLLEKDEDEILEEIIKILTIFEDRKMRKRQLMKFKDKLSEKAINQLSKKHYTGWGQLSEKLINGIRDEQSNKTILDYLIEDNGCPKNMNRNFMQLINDDTLSFKEKIRKAQDINQVNDIKEIVKDLPGSPAIKKGIYQSIRIVDEIIRKMKDRPKNIVIEMARENQTTQEGKNKSKARLKKIQEGLENLDSVHVEKQALDEEMLKSPKYYLYCLQNGKDIYTGKDLDIGQLQTYDIDHIIPRSFITDNSFDNLVLTSSTVNRGKLDNVPSPDIVRQQKGFWKQLLRAGLMSQRKFNNLTKGKLTDRDRQQFINRQLVETRQITKHVANLLSHHLNEKKEVGEINIVLLKSALTSQFRKKFDFYKVREVNDYHHAHDAYLNGVIALKLLELYPYMAKDLIYGKYSYHRKIEGDKATQAKYKMSNIIERFSQDLLANPDGEIAWEKDKDLNTIRKVLSSKQINIIKKAEEGKGRLFKETINSRPSKKTEKRIPIKNNLDPNIYGGYIEEKMAYYIAINYLENGKTKKAIVGISIKDKKDFEGQTTEYLGKIGFNKASIINSFKNYTLFELENGSRRMIVGASKENDSKGELQKGNQMYLPQNLLEFVYHLKHYNEDETSHKFIVEHKAYFDELLNYIVEFANKYLELENSIEKIKDLYHGKGPDVEEKELVESFINLLAITKCGPAADITFLGEKISRKRYRSTNCLWGSEVIFQSPTGLYETRLRLE

SEQ ID NO: 195 - protein, 1384 aa, synthetic construct
MDKKYSIGLDIGTNSVGWAVITDEYKVPSKKFKVLGNTDRHSIKKNLIGALLFDSGETAEATRLKRTARRRYTRRKNRICYLQEIFSNEMAKVDDSFFHRLEESFLVEEDKKHERHPIFGNIVDEVAYHEKYPTIYHLRKKLVDSTDKADLRLIYLALAHMIKFRGHFLIEGDLNPDNSDVDKLFIQLVQTYNQLFEENPINASGVDAKAILSARLSKSRRLENLIAQLPGEKKNGLFGNLIALSLGLTPNFKSNFDLAEDAKLQLSKDTYDDDLDNLLAQIGDQYADLFLAAKNLSDAILLSDILRVNTEITKAPLSASMIKRYDEHHQDLTLLKALVRQQLPEKYKEIFFDQSKNGYAGYIDGGASQEEFYKFIKPILEKMDGTEELLVKLNREDLLRKQRTFDNGSIPHQIHLGELHAILRRQEDFYPFLKDNREKIEKILTFRIPYYVGPLARGNSRFAWMTRKSEETITPWNFEEVVDKGASAQSFIERMTNFDKNLPNEKVLPKHSLLYEYFTVYNELTKVKYVTEGMRKPAFLSGEQKKAIVDLLFKTNRKVTVKQLKEDYFKKIECFDSVEISGVEDRFNASLGTYHDLLKIIKDKDFLDNEENEDILEDIVLTLTLFEDREMIEERLKTYAHLFDDKVMKQLKRRRYTGWGRLSRKLINGIRDKQSGKTILDFLKSDGFANRNFMQLIHDDSLTFKEDIQKAQVSGQGDSLHEHIANLAGSPAIKKGILQTVKVVDELVKVMGRHKPENIVIEMARENQTTQKGQKNSRERMKRIEEGIKELGSQILKEHPVENTQLQNEKLYLYYLQNGRDMYVDQELDINRLSDYDVDHIVPQSFLKDDSIDNKVLTRSDKNRGKSDNVPSEEVVKKMKNYWRQLLNAKLITQRKFDNLTKAERGGLSELDKAGFIKRQLVETRQITKHVAQILDSRMNTKYDENDKLIREVKVITLKSKLVSDFRKDFQFYKVREINNYHHAHDAYLNAVVGTALIKKYPKLESEFVYGDYKVYDVRKMIAKSEQEIGKATAKYFFYSNIMNFFKTEITLANGEIRKRPLIETNGETGEIVWDKGRDFATVRKVLSMPQVNIVKKTEVQTGGFSKESILPKRNSDKLIARKKDWDPKKYGGFDSPTVAYSVLVVAKVEKGKSKKLKSVKELLGITIMERSSFEKNPIDFLEAKGYKEVKKDLIIKLPKYSLFELENGRKRMLASAGELQKGNELALPSKYVNFLYLASHYEKLKGSPEDNEQKQLFVEQHKHYLDEIIEQISEFSKRVILADANLDKVLSAYNKHRDKPIREQAENIIHLFTLTNLGAPAAFKYFDTTIDRKRYTSTKEVLDATLIHQSITGLYETRIDLSQLGGDGSPKKKRKVSSGGAAG

SEQ ID NO: 196 - protein, 1332 aa, Dolosigranulum pigrum
MQKNYTIGLDIGTNSVGWAVMKDDYTLIRKRMKVLGNTDIKKIKKNFWGVRLFDEGETAKETRLKRGTRRRYQRRRNRLIYLQDIFQQPMLAIDENFFHRLDDSFFVPDDKSYDRHPIFGSLEEEVAYHNTYPTIYHLRKHLADNPEKADLRLVYTALAHIVKYRGHFLIEGELNTENTSISETFEQFLDTYSDIFKEQLVGDISKVEEILSSKQSRSRKHEQIMALFPNENKLGNFGRFMMLIVGNTSNFKPVFDLDDEYKLKLSDETYEEDLDTLLGMTDDVFLDVFMAAKNVYDAVEMSAIISTDTGNSKAVLSNQMINFYDEHKVDLAQLKQFFKTHLPDKYYECFSDPSKNGYAGYIDGKTNQEDFYKYIEKVMKTIKSDKKDYFLDKIDREVFLRKQRSFYNSVIPHQIHLQEMQAILDRQSQYYPFLAENRDKIESLVTFRIPYYVGPLTVSDQSEFAWMERQSDEPIRPWNFDEIVNKERSAEKFIERMTNMDTYLLEEKVLPKRSLLYQTFEVYNELTKVRYTNEQGKTEKLNRQQKAEIIETLFKQKNRVREKDIANYLEQYGYVDGTDIKGVEDKFNASLSTYNDLAKIDGAKAYLDDPEYADVWEDIIKILTIFEDKAMRKKQLQTYSDTLSPEILKKLERKHYTGWGRFSKKLINGLRDEGSNKTILDYLKSDEGSSGPTNRNFMQLIRDNTLSFKKKIEDAQTIEDTTHIYDTVAELPGSPAIKKGIRQALKIVEEIIDIIGYEPENIVVEMARESQTTKKGKDLSKERLEKLTEAIKEFDGPSDVKVKDLKNENLRNDRLYLYYLQNGRDMYTNEPLDINNLSKYDIDHIIPQSFTTDNSIDNKVLVSRTKNQGNKSDDVPSINIVHKMKPFWRQLHKAGLISDRKFKNLTKAEHGGLTEADRAHFLNRQLVETRQITKHVANLLDSQYNTAEEQRINIVLLKSSMTSRFRKEFKLYKVREINDYHHGHDAYLNAVVATTIMKVYPNLKPQFVYGQYKKTSMFKEEKATARKHFYSNITKFFKKEKVVNEETGEILWDTERHLSTIKRVLSWKQMNIVKKVEKQKGQLWKETIYPKGDSSKLIPVKEGMDPQKYGGLSQVSEAFAVVITHEKGKKKQLKSDLISIPIVDQKAYEQHPTAYLEEAGYNNPTVLHELFKYQLFELEDGSRRMIASAKEFQKGNQMVLPLELVELLYHANRYDKVKFPDSIEYVHDNLAKFDDLLEYVIDFSNKYINADKNVQKIQKIYKEHGTEDVELTVESFVNLMTFTAMGAPATFKFYGESITRSRYTSITEFRGSTLIFQSITGLYETRYKLEDN

SEQ ID NO: 197 - protein, 1337 aa, Enterococcus sp.
MKKDYVIGLDIGTNSVGWAVMTEDYQLVKKKMPIYGNTEKKKIKKNFWGVRLFEEGHTAEDRRLKRTARRRISRRRNRLRYLQAFFEEAMTDLDENFFARLQESFLVPEDKKWHRHPIFAKLEDEVAYHETYPTIYHLRKKLADSSEQADLRLIYLALAHIVKYRGHFLIEGKLSTENISVKEQFQQFMIIYNQTFVNGESRLVSAPLPESVLIEEELTEKASRTKKSEKVLQQFPQEKANGLFGQFLKLMVGNKADFKKVFGLEEEAKITYASESYEEDLEGILAKVGDEYSDVFLAAKNVYDAVELSTILADSDKKSHAKLSSSMIVRFTEHQEDLKKFKRFIRENCPDEYDNLFKNEQKDGYAGYIAHAGKVSQLKFYQYVKKIIQDIAGAEYFLEKIAQENFLRKQRTFDNGVIPHQIHLAELQAIIHRQAAYYPFLKENQEKIEQLVTFRIPYYVGPLSKGDASTFAWLKRQSEEPIRPWNLQETVDLDQSATAFIERMTNFDTYLPSEKVLPKHSLLYEKFMVFNELTKISYTDDRGIKANFSGKEKEKIFDYLFKTRRKVKKKDIIQFYRNEYNTEIVTLSGLEEDQFNASFSTYQDLLKCGLTRAELDHPDNAEKLEDIIKILTIFEDRQRIRTQLSTFKGQFSAEVLKKLERKHYTGWGRLSKKLINGIYDKESGKTILGYLIKDDGVSKHYNRNFMQLINDSQLSFKNAIQKAQSSEHEETLSETVNELAGSPAIKKGIYQSLKIVDELVAIMGYAPKRIVVEMARENQTTSTGKRRSIQRLKIVEKAMAEIGSNLLKEQPTTNEQLRDTRLFLYYMQNGKDMYTGDELSLHRLSHYDIDHIIPQSFMKDDSLDNLVLVGSTENRGKSDDVPSKEVVKDMKAYWEKLYAAGLISQRKFQRLTKGEQGGLTLEDKAHFIQRQLVETRQITKNVAGILDQRYNANSKEKKVQIITLKASLTSQFRSIFGLYKVREVNDYHHGQDAYLNCVVATTLLKVYPNLAPEFVYGEYPKFQTFKENKATAKAIIYTNLLRFFTEDEPRFTKDGEILWSNSYLKTIKKELNYHQMNIVKKVEVQKGGFSKESIKPKGPSNKLIPVKNGLDPQKYGGFDSPIVAYTVLFTHEKGKKPLIKQEILGITIMEKTRFEQNPILFLEEKGFLRPRVLMKLPKYTLYEFPEGRRRLLASAKEAQKGNQMVLPEHLLTLLYHAKQCLLPNQSESLAYVEQHQPEFQEILERVVDFAEVHTLAKSKVQQIVKLFEANQTADVKEIAASFIQLMQFNAMGAPSTFKFFQKDIERARYTSIKEIFDATIIYQSTTGLYETRRKVVD

SEQ ID NO: 198 - protein, 1288 aa, Enterococcus faecalis
MRLFEEGHTAEDRRLKRTARRRISRRRNRLRYLQAFFEEAMTDLDENFFARLQESFLVPEDKKWHRHPIFAKLEDEVAYHETYPTIYHLRKKLADSSEQADLRLIYLALAHIVKYRGHFLIEGKLSTENTSVKDQFQQFMVIYNQTFVNGESRLVSAPLPESVLIEEELTEKASRTKKSEKVLQQFPQEKANGLFGQFLKLMVGNKADFKKVFGLEEEAKITYASESYEEDLEGILAKVGDEYSDVFLAAKNVYDAVELSTILADSDKKSHAKLSSSMIVRFTEHQEDLKKFKRFIRENCPDEYDNLFKNEQKDGYAGYIAHAGKVSQLKFYQYVKKIIQDIAGAEYFLEKIAQENFLRKQRTFDNGVIPHQIHLAELQAIIHRQAAYYPFLKENQEKIEQLVTFRIPYYVGPLSKGDASTFAWLKRQSEEPIRPWNLQETVDLDQSATAFIERMTNFDTYLPSEKVLPKHSLLYEKFMVFNELTKISYTDDRGIKANFSGKEKEKIFDYLFKTRRKVKKKDIIQFYRNEYNTEIVTLSGLEEDQFNASFSTYQDLLKCGLTRAELDHPDNAEKLEDIIKILTIFEDRQRIRTQLSTFKGQFSAEVLKKLERKHYTGWGRLSKKLINGIYDKESGKTILDYLVKDDGVSKHYNRNFMQLINDSQLSFKNAIQKAQSSEHEETLSETVNELAGSPAIKKGIYQSLKIVDELVAIMGYAPKRIVVEMARENQTTSTGKRRSIQRLKIVEKAMAEIGSNLLKEQPTTNEQLRDTRLFLYYMQNGKDMYTGDELSLHRLSHYDIDHIIPQSFMKDDSLDNLVLVGSTENRGKSDDVPSKEVVKDMKAYWEKLYAAGLISQRKFQRLTKGEQGGLTLEDKAHFIQRQLVETRQITKNVAGILDQRYNAKSKEKKVQIITLKASLTSQFRSIFGLYKVREVNDYHHGQDAYLNCVVATTLLKVYPNLAPEFVYGEYPKFQTFKENKATAKAIIYTNLLRFFTEDEPRFTKDGEILWSNSYLKTIKKELNYHQMNIVKKVEVQKGGFSKESIKPKGPSNKLIPVKNGLDPQKYGGFDSPVVAYTVLFTHEKGKKPLIKQEILGITIMEKTRFEQNPILFLEEKGFLRPRVLMKLPKYTLYEFPEGRRRLLASAKEAQKGNQMVLPEHLLTLLYHAKQCLLPNQSESLAYVEQHQPEFQEILERVVDFAEVHTLAKSKVQQIVKLFEANQTADVKEIAASFIQLMQFNAMGAPSTFKFFQKDIERARYTSIKEIFDATIIYQSPTGLYETRRKVVD

SEQ ID NO: 199 - protein, 1079 aa, Enterococcus durans
MDEEAKIQLSKESYEEELESLLEKSGEEFRDVFLQAKKVYDAILLSDILSTKKQNSKAKLSLGMIERYDSHKKDLEELKQFVKANLPEKTAIFFKDSSKNGYAGYIDGKTTQEDFYKFLKKELNGIAGSERFMEKVDQENFLLKQRTTANGVIPHQVHLTELKAIIERQKPYYPSLEEARDKMIRLLTFRIPYYVGPLAQGEETSSFAWLERKTPEKVTPWNATEVIDYSASAMKFIQRMINYDTYLPTEKVLPKHSILYQKYTIFNELTKVAYKDERGIKHQFSSKEKREIFKELFQKQRKVTVKKLQQFLSANYNIEDAEILGVDKAFNSSYATYHDFLDLAKPNTERVAELLEQPEMNAMFEDIVKILTIFEDREMIRTQLKKYQSVLGDGFFKKLVKKHYTGWGRLSERLINGIRDKKTNKTILDYLIDDDDFPYNRNRNFMQLINDDSLSFKEELANELALAGNQSLLEVVEALLGSPAIKKGIWQTLKIVEELIEIIGYNPKNIVVEMARENQRTNRSKPRLKALEEALKSFDSPLLKEQPVDNQALQKDRLYLYYLQNGKDMYTGEALDIDRLSEYDIDHIIPRSFIVDNSIDNKVLVSSKENRLKMDDVPDQKVVIRMRRYWEKLLRANLISERKFAYLTKLELTPEDKARFIQRQLVETRQITKHVAAILDQYFNQPEESKNKGIRIITLKSSLVSQFRKTFGINKVREINNHHHAHDAYLNGVVAIALLKKYPKLEPEFVYGNYTKFNLATENKATAKKEFYSNILRFFEKEEYSYDENGEIFWDKARHIPQIKKVISSHQVNIVKKVEVQTGGFYKETVNPKGKPDKLIQRKAGWDVSKYGGFGSPVVAYAVAFIYEKGKARKKAKAIEGITIMKQSLFEQDPIGFLSNKGYSNVTKFIKLSKYTLYELENGRRRMVASHKEAQKANSFILPEKLVTLLYHAQHYDEIAHKESFDYVNDHLSEFREILDQVIDFSNRYTIAAKNTEKIAELFEQNQESTVQSLSQSFINLMQLNAMGAPADFKFFDVIIPRKRYPSLTEIWESTIIYQSITGLRETRTRMATLWDGEQ

SEQ ID NO: 200 - protein, 1337 aa, Enterococcus faecalis
MKKDYVIGLDIGTNSVGWAVMTEDYQLVKKKMPIYGNTEKKKIKKNFWGVRLFEEGHTAEDRRLKRTARRRISRRRNRLRYLQAFFEEAMTDLDENFFARLQESFLVPEDKKWHRHPIFAKLEDEVAYHETYPTIYHLRKKLADSSEQADLRLIYLALAHIVKYRGHFLIEGKLSTENTSVKEQFQQFMVIYNQTFVNGESRLVSAPLPESVLIEEELTEKASRTKKSEKVLQQFPQEKANGLFGQFLKLMVGNKADFKKVFGLEEEAKITYASESYEEDLEGILAKVGDEYSDVFLAAKNVYDAVELSTILADSDKKSHAKLSSSMIVRFTEHQEDLKKFKRFIRENCPDEYDNLFKNEQKDGYAGYIAHAGKVSQLKFYQYVKKIIQDIAGAEYFLEKIAQENFLRKQRTFDNGVIPHQIHLAELQAIIHRQAAYYPFLKENQEKIEQLVTFRIPYYVGPLSKGDASTFAWLKRQSEEPIRPWNLQETVDLDQSATAFIERMTNFDTYLPSEKVLPKHSLLYEKFMVFNELTKISYTDDRGIKANFSGKEKEKIFDYLFKTRRKVKKKDIIQFYRNEYNTEIVTLSGLEEDQFNASFSTYQDLLKCGLTRAELDHPDNAEKLEDIIKILTIFEDRQRIRTQLSTFKGQFSAEVLKKLERKHYTGWGRLSKKLINGIYDKESGKTILDYLVKDDGVSKHYNRNFMQLINDSQLSFKNAIQKAQSSEHEETLSETVNELAGSPAIKKGIYQSLKIVDELVAIMGYAPKRIVVEMARENQTTSTGKRRSIQRLKIVEKAMAEIGSNLLKEQPTTNEQLRDTRLFLYYMQNGKDMYTGDELSLHRLSHYDIDHIIPQSFMKDDSLDNLVLVGSTENRGKSDDVPSKKVVKKMKAYWEKLYAAGLISQRKFQRLTKGEQGGLTLEDKAHFIQRQLVETRQITKNVAGILDQRYNAKSKEKKVQIITLKASLTSQFRSIFGLYKVREVNDYHHGQDAYLNCVVATTLLKVYPNLAPEFVYGEYPKFQAFKENKATAKTIIYTNLMRFFTEDEPRFTKDSEILWSNSYLKTIKKELNYHQMNIVKKVEVQKGGFSKESIKPKGPSNKLIPVKNGLDPQKYGGFDSPVVAYTVLFTHEKGKKPLIKQEILGITIMEKTRFEQNPILFLEEKGFLRPRVLMKLPKYTLYEFPEGRRRLLASAKEAQKGNQMVLPEHLLTLLYHAKQCLLPNQSESLAYVEQHQPEFQEILERVVDFAEVHTLAKSKVQQIVKLFEANQTADVKEIAASFIQLMQFNAMGAPSTFKFFQKDIERARYTSIKEIFDATIIYQSTTGLYETRRKVVD

SEQ ID NO: 201 - protein, 1337 aa, Enterococcus faecalis
MKKDYVIGLDIGTNSVGWAVMTEDYQLVKKKMPIYGNTEKKKIKKNFWGVRLFEEGHTAEDRRLKRTARRRISRRRNRLRYLQAFFEEAMTALDENFFARLQESFLVPEDKKWHRHPIFAKLEDEVAYHETYPTIYHLRKKLADSSEQADLRLIYLALAHIVKYRGHFLIEGKLSTENISVKEQFQQFMIIYNQTFVNGESRLVSAPLPESVLIEEELTEKASRTKKSEKVLQQFPQEKANGLFGQFLKLMVGNKADFKKVFGLEEEAKITYASESYEEDLEGILAKVGDEYSDVFLAAKNVYDAVELSTILADSDKKSHAKLSSSMIVRFTEHQEDLKNFKRFIRENCPDEYDNLFKNEQKDGYAGYITHAGKVSQLKFYQYVKKIIQDIAGAEYFLEKIAQENFLRKQRTFDNGVIPHQIHLAELQAIIHRQAAYYPFLKENQEKIEQLVTFRIPYYVGPLSKGDANTFAWLKRQSEEPIRPWNLQETVDLDQSATAFIERMTNFDTYLPSEKVLPKHSLLYEKFMVFNELTKISYTDDRGIKANFSGKEKEKIFDYLFKTRRKVKKKDIIQFYRNEYNTEIVTLSGLEEDQFNASFSTYQDLLKCGLTRAELDHPDNAEKLEDIIKILTIFEDRQRIRTQLSTFKGQFSAEVLKKLERKHYTGWGRLSKKLINGIYDKESGKTILDYLIKDDGVSKHYNRNFMQLINDSQLSFKNAIQKAQSSEHEETLSETVNELAGSPAIKKGIYQSLKIVDELVAIMGYAPKRIVVEMARENQTTSTGKRRSIQRLKIVEKAMAEIGSNLLKEQPTTNEQLRDTRLFLYYMQNGKDMYTGDELSLHRLSHYDIDHIIPQSFMKDDSLDNLVLVGSTENRGKSDDVPSKEVVKDMKAYWEKLYAAGLISQRKFQRLTKGEQGGLTLEDKAHFIQRQLVETRQITKNVAGILDQRYNAKSKEKKVQIITLKASLTSQFRSIFGLYKVREVNDYHHGQDAYLNCVVATTLLKVYPNLAPEFVYGEYPKFQTFKENKATAKAIIYTNLLRFFTEDEPRFTKDGEILWSNSYLKTIKKELNYHQMNIVKKVEVQKGGFSKESIKPKGPSNKLIPVKNGLDPQKYGGFDSPIVAYTVLFTHEKGKKPLIKQEILGITIMEKTRFEQNPILFLEEKGFLRPRVLMKLPKYTLYQFPEGRRRLLASAKEAQKGNQMVLPEHLLTLLYHAKQCLLPNQSESLAYVEQHQPEFQEILERVVDFAEVHTLAKSKVQQIVKLFEANQTADVKEIAASFIQLMQFNAMGAPSTFKFFQKDIERARYTSIKEIFDATIIYQSTTGLYETRRKVVD

SEQ ID NO: 202 - protein, 1337 aa, Enterococcus faecalis
MKKDYVIGLDIGTNSVGWAVMTEDYQLVKKKMPIYGNTEKKKIKKNFWGVRLFEEGHTAEDRRLKRTARRRISRRRNRLRYLQAFFEEAMTALDENFFARLQESFLVPEDKKWHRHPIFAKLEDEVAYHETYPTIYHLRKKLADSSEQADLRLIYLALAHIVKYRGHFLIEGKLSTENISVKEQFQQFMIIYNQTFVNGESRLVSTPLPESVLIEEELTEKASRTKKSEKVLQQFPQEKANGLFGQFLKLMVGNKADFKKVFGLEEEAKITYASESYEEDLEGILAKVGDEYSDVFLAAKNVYDAVELSTILADSDKKSHAKLSSSMIVRFTEHQEDLKNFKRFIRENCPDEYDNLFKNEQKDGYAGYITHAGKVSQLKFYQYVKKIIQDIAGAEYFLEKIAQENFLRKQRTFDNGVIPHQIHLAELQAIIHRQAAYYPFLKENQEKIEQLVTFRIPYYVGPLSKGDASTFAWLKRQSEEPIRPWNLQETVDLDQSATAFIERMTNFDTYLPSEKVLPKHSLLYEKFMVFNELTKISYTDDRGIKANFSGKEKEKIFDYLFKTRRKVKKKDIIQFYRNEYNTEIVTLSGLEEDQFNASFSTYQDLLKCGLTRAELDHPDNAEKLEDIIKILTIFEDRQRIRTQLSTFKGQFSAEVLKKLERKHYTGWGRLSKKLINGIYDKESGKTILDYLVKDDGVSKHYNRNFMQLINDSQLSFKNAIQKAQSSEHEETLSETVNELAGSPAIKKGIYQSLKIVDELVAIMGYAPKRIVVEMARENQTTSTGKRRSIQRLKIVEKAMAEIGSNLLKEQPTTNEQLRDTRLFLYYMQNGKDMYTGDELSLHRLSHYDIDHIIPQSFMKDDSLDNLVLVGSTENRGKSDDVPSKEVVKDMKAYWEKLYAAGLISQRKFQRLTKGEQGGLTLEDKAHFIQRQLVETRQITKNVAGILDQRYNAKSKEKKVQIITLKASLTSQFRSIFGLYKVREVNDYHHGQDAYLNCVVATTLLKVYPNLAPEFVYGEYPKFQTFKENKATAKAIIYTNLLRFFTEDEPRFTKDGEILWSNSYLKTIKKELNYHQMNIVKKVEVQKGGFSKESIKPKGPSNKLIPVKNGLDPQKYGGFDSPIVAYTVLFTHEKGKKPLIKQEILGITIMEKTRFEQNPILFLEEKGFLRPRVLMKLPKYTLYEFPEGRRRLLASAKEAQKGNQMVLPEHLLTLLYHAKQCLLPNQSESLAYVEQHQPEFQEILERVVDFAEVHTLAKSKVQQIVKLFEANQTADVKEIAASFIQLMQFNAMGAPSTFKFFQKDIERARYTSIKEIFDATIIYQSTTGLYETRRKVVD

SEQ ID NO: 203 - protein, 1337 aa, Enterococcus faecalis
MKKDYVIGLDIGTNSVGWAVMTEDYQLVKKKMPIYGNTEKKKIKKNFWGVRLFEEGHTAEDRRLKRTARRRISRRRNRLRYLQAFFEEAMTDLDENFFARLQESFLVPEDKKWHRHPIFAKLEDEVAYHETYPTIYHLRKKLADSSEQADLRLIYLALAHIVKYRGHFLIEGKLSTENISVKEQFQQFMIIYNQTFVNGESRLVSAPLPESVLIEEELTEKASRTKKSEKVLQQFPQEKANGLFGQFLKLMVGNKADFKKVFGLEEEAKITYASESYEEDLEGILAKVGDEYSDVFLAAKNVYDAVELSTILADSDKKSHAKLSSSMIVRFTEHQEDLKKFKRFIRENCPDEYDNLFKNEQKDGYAGYIAHAGKVSQLKFYQYVKKIIQDIAGAEYFLEKIAQENFLRKQRTFDNGVIPHQIHLAELQAIIHRQAAYYPFLKENQEKIEQLVTFRIPYYVGPLSKGDASTFAWLKRQSEEPIRPWNLQETVDLDQSATAFIERMTNFDTYLPSEKVLPKHSLLYEKFMVFNELTKISYTDDRGIKANFSGKEKEKIFDYLFKTRRKVKKKDIIQFYRNEYNTEIVTLSGLEEDQFNASFSTYQDLLKCGLTRAELDHPDNAEKLEDIIKILTIFEDRQRIRTQLSTFKGQFSAEVLKKLERKHYTGWGRLSKKLINGIYDKESGKTILDYLVKDDGVSKHYNRNFMQLINDSQLSFKNAIQKAQSSEHEETLSETVNELAGSPAIKKGIYQSLKIVDELVAIMGYAPKRIVVEMARENQTTSTGKRRSIQRLKIVEKAMAEIGSNLLKEQPTTNEQLRDTRLFLYYMQNGKDMYTGDELSLHRLSHYDIDHIIPQSFMKDDSLDNLVLVGSTENRGKSDDVPSKEVVKDMKAYWEKLYAAGLISQRKFQRLTKGEQGGLTLEDKAHFIQRQLVETRQITKNVAGILNQRYNANSKEKKVQIITLKASLTSQFRSIFGLYKVREVNDYHHGQDAYLNCVVATTLLKVYPNLAPEFVYGEYPKFQTFKENKATAKAIIYTNLLRFFTEDEPRFTKDGEILWSNSYLKTIKKELNYHQMNIVKKVEVQKGGFSKESIKPKGPSNKLIPVKNGLDPQKYGGFDSPVVAYTVLFTHEKGKKPLIKQEILGITIMEKTRFEQNPILFLEEKGFLRPRVLMKLPKYTLYEFPEGRRRLLASAKEAQKGNQMVLPEHLLTLLYHAKQCLLPNQSESLAYVEQHQPEFQEILERVVDFAEVHTLAKSKVQQIVKLFEANQTADVKEIAASFIQLMQFNAMGAPSTFKFFQKDIERARYTSIKEIFDATIIYQSTTGLYETRRKVVD

SEQ ID NO: 204 - protein, 1339 aa, Enterococcus faecalis
MKKDYVIGLDIGTNSVGWAVMTEDYQLVKKKMPIYGNTEKKKIKKNFWGVRLFEEGHTAEDRRLKRTARRRISRRRNRLRYLQAFFEEAMTALDENFFARLQESFLVPEDKKWHRHPIFAKLEDEVAYHETYPTIYHLRKKLADSSEQADLRLIYLALAHIVKYRGHFLIEGKLSTENISVKEQFQQFMIIYNQTFVNGESRLVSAPLPESVLIEEELTEKASRTKKSEKVLQQFPQEKANGLFGQFLKLMVGNKADFKKVFGLEEEAKIKITYASESYEEDLEGILAKVGDEYSDVFLAAKNVYDAVELSTILADSDKKSHAKLSSSMIVRFTEHQEDLKNFKRFIRENCPDEYDNLFKNEQKDGYAGYIAHAGKVSQLKFYQYVKKIIQDIAGAEYFLEKIAQENFLRKQRTFDNGVIPHQIHLAELQAIIHRQAAYYPFLKENQKKIEQLVTFRIPYYVGPLSKGDASTFAWLKRQSEEPIRPWNLQETVDLDQSATAFIERMTNFDTYLPSEKVLPKHSLLYEKFMVFNELTKISYTDDRGIKANFSGKEKEKIFDYLFKTRRKVKKKDIIQFYRNEYNTEIVTLSGLEEDQFNASFSTYQDLLKCGLTRAELDHPDNAEKLEDIIKILTIFEDRQRIRTQLSTFKGQFSEEVLKKLERKHYTGWGRLSKKLINGIYDKESGKTILDYLIKDDGVSKHYNRNFMQLINDSQLSFKNAIQKAQSSEHEETLSETVNELAGSPAIKKGIYQSLKIVDELVAIMGYAPKRIVVEMARENQTTSTGKRRSIQRLKIVEKAMAEIGSNLLKEQPTTNEQLRDTRLFLYYMQNGKDMYTGDELSLHRLSHYDIDHIIPQSFMKDDSLDNLVLVGSTENRGKSDDVPSKEVVKKMKAYWEKLYAAGLISQRKFQRLTKGEQGGLTLEDKAHFIQRQLVETRQITKNVAGILDQRYNAKSKEKKVQIITLKASLTSQFRSIFGLYKVREVNDYHHGQDAYLNCVVATTLLKVYPNLAPEFVYGEYPKFQAFKENKATAKAIIYTNLLRFFTEDEPRFTKDGEILWSNSYLKTIKKELNYHQMNIVKKVEVQKGGFSKESIKPKGPSNKLIPVKNGLDPQKYGGFDSPVVAYTVLFTHEKGKKPLIKQEILGITIMEKTRFEQNPILFLEEKGFLRPRVLMKLPKYTLYEFPEGRRRLLASAKEAQKGNQMVLPEHLLTLLYHAKQCLLPNQSESLAYVEQHQPEFQEILERVVDFAEVHTLAKSKVQQIVKLFEANQTADVKEIAASFIQLMQFNAMGAPSTFKFFQKDIERARYTSIKEIFDATIIYQSTTGLYETRRKVVD

SEQ ID NO: 205 - protein, 1337 aa, Enterococcus faecalis
MKKDYVIGLDIGTNSVGWAVMTEDYQLVKKKMPIYGNTEKKKIKKNFWGVRLFEEGHTAEDRRLKRTARRRISRRRNRLRYLQAFFEEAMTALDENFFARLQESFLVPEDKKWHRHPIFAKLEDEVAYHETYPTIYHLRKKLADSSEQADLRLIYLALAHIVKYRGHFLIEGKLSTENISVKEQFQQFMIIYNQTFVNGESRLVSAPLPESVLIEEELTEKASRTKKSEKVLQQFPQEKANGLFGQFLKLMVGNKADFKKVFGLEEEAKITYASESYEEDLEGILAKVGDEYSDVFLAAKNVYDAVELSTILADSDKKSHAKLSSSMIVRFTEHQEDLKKFKRFIRENCPDEYDNLFKNEQKDGYAGYIAHAGKVSQLKFYQYVKKIIQDIAGAEYFLEKIAQENFLRKQRTFDNGVIPHQIHLAELQAIIHRQAAYYPFLKENQEKIEQLVTFRIPYYVGPLSKGDASTFAWLKRQSEEPIRPWNLQETVDLDQSATAFIERMTNFDTYLPSEKVLPKHSLLYEKFMVFNELTKISYTDDRGIKANFSGKEKEKIFDYLFKTRRKVKKKDIIQFYRNEYNTEIVTLSGLEEDQFNASFSTYQDLLKCGLTRAELDHPDNAEKLEDIIKILTIFEDRQRIRTQLSTFKGQFSAEVLKKLERKHYTGWGRLSKKLINGIYDKESGKTILGYLIKDDGVSKHYNRNFMQLINDSQLSFKNAIQKAQSSEHEETLSETVNELAGSPAIKKGIYQSLKIVDELVAIMGYAPKRIVVEMARENQTTSTGKRRSIQRLKIVEKAMAEIGSNLLKEQPTTNEQLRDTRLFLYYMQNGKDMYTGDELSLHRLSHYDIDHIIPQSFMKDDSLDNLVLVGSTENRGKSDDVPSKEVVKDMKAYWEKLYAAGLISQRKFQRLTKGEQGGLTLEDKAHFIQRQLVETRQITKNVAGILDQRYNAKSKEKKVQIITLKASLTSQFRSIFGLYKVREVNDYHHGQDAYLNCVVATTLLKVYPNLAPEFVYGEYPKFQTFKENKATAKAIIYTNLLRFFTEDEPRFTKDGEILWSNSYLKTIKKELNYHQMNIVKKVEVQKGGFSKESIKPKGPSNKLIPVKNGLDPQKYGGFDSPIVAYTVLFTHEKGKKPLIKQEILGITIMEKTRFEQNPILFLEEKGFLRPRVLMKLPKYTLYEFPEGRRRLLASAKEAQKGNQMVLPEHLLTLLYHAKQCLLPNQSESLAYVEQHQPEFQEILERVVDFAEVHTLAKSKVQQIVKLFEANQTADVKEIAASFIQLMQFNAMGAPSTFKFFQKDIERARYTSIKEIFDATIIYQSTTGLYETRRKVVD

SEQ ID NO: 206 - protein, 1337 aa, Enterococcus faecalis
MKKDYVIGLDIGSNSVGWAVMTEDYQLVKKKMPIYGNTEKKKIKKNFWGVRLFEEGHTAEDRRLKRTARRRISRRRNRLRYLQAFFEEAMTDLDENFFARLQESFLVPEDKKWHRHPIFAKLEDEVAYHETYPTIYHLRKKLADSSEQADLRLIYLALAHIVKYRGHFLIEGKLSTENTSVKDQFQQFMVIYNQTFVNGESRLVSAPLPESVLIEEELTEKASRTKKSEKVLQQFPQEKANGLFGQFLKLMVGNKADFKKVFGLEEEAKITYASESYEEDLEGILAKVGDEYSDVFLAAKNVYDAVELSTILADSDKKSHAKLSSSMIVRFTEHQEDLKNFKRFIRENCPDEYDNLFKNEQKDGYAGYITHAGKVSQLKFYQYVKKIIQDIAGAEYFLEKIAQENFLRKQRTFDNGVIPHQIHLAELQAIIHRQAAYYPFLKENQEKIEQLVTFRIPYYVGPLSKGDASTFAWLKRQSEEPIRPWNLQETVDLDQSATAFIERMTNFDTYLPSEKVLPKHSLLYEKFMVFNELTKISYTDDRGIKANFSGKEKEKIFDYLFKTRRKVKKKDIIQFYRNEYNTEIVTLSGLEEDQFNASFSTYQDLLKCGLTRAELDHPDNAEKLEDIIKILTIFEDRQRIRTQLSTFKGQFSAEVLKKLERKHYTGWGRLSKKLINGIYDKESGKTILDYLIKDDGVSKHYNRNFMQLINDSQLSFKNAIQKAQSSEHEETLSETVNELAGSPAIKKGIYQSLKIVDELVAIMGYAPKRIVVEMARENQTTSTGKRRSIQRLKIVEKAMAEIGSNLLKEQPTTNEQLRDTRLFLYYMQNGKDMYTGDELSLHRLSHYDIDHIIPQSFMKDDSLDNLVLVGSTENRGKSDDVPSKEVVKDMKAYWEKLYAAGLISQRKFQRLTKGEQGGLTLEDKAHFIQRQLVETRQITKNVAGILDQLYNAKSKEKKVQIITLKASLTSQFRSIFGLYKVREVNDYHHGQDAYLNCVVATTLLKVYPNLAPEFVYGEYPKFQTFKENKATAKTIIYTNLMRFFTEDEPRFTKDGEILWSNSYLKTIKKELNYHQMNIVKKVEVQKGGFSKESIKPKGPSNKLIPVKNGLDPQKYGGFDSPVVAYTVLFTHEKGKKPLIKQEILGITIMEKTRFEQNPILFLEEKGFLRPRVLMKLPKYTLYEFPEGRRRLLASAKEAQKGNQMVLPEHLLTLLYHAKQCLLPNQSESLAYVEQHQPEFQEILERVVDFAEVHTLAKSKVQQIVKLFEANQTADVKEIAASFIQLMQFNAMGAPSTFKFFQKDIERARYTSIKEIFDATIIYQSTTGLYETRRKVVD

SEQ ID NO: 207 - protein, 1337 aa, Enterococcus faecalis
MKKDYVIGLDIGTNSVGWAVMTEDYQLVKKKMPIYGNTEKKKIKKNFWGVRLFEEGHTAEDRRLKRTARRRISRRRNRLRYLQAFFEEAMTALDENFFARLQESFLVPEDKKWHRHPIFAKLEDEVAYHETYPTIYHLRKKLADSSEQADLRLIYLALAHIVKYRGHFLIEGKLSTENISVKEKFQQFMIIYNQTFVNGEGRLVSAPLPESVLIEEELTEKASRTKKSEKVLQQFPQEKANGLFGQFLKLMVGNKADFKKVFGLEEEAKITYASESYEEDLEGILAKVGDEYSDVFLAAKNVYDAVELSTILADSDKKSYAKLSSSMIVRFTEHQEDLKKFKRFIRENCPDEYDNLFKNEQKDGYAGYIAHAGKVSQLKFYQYVKKIIQDIAGAEYFLEKIAQENFLRKQRTFDNGVIPHQIHLAELQAIIHRQAAYYPFLKENQEKIEQLVTFRIPYYVGPLSKGDASTFAWLKRQSEEPIRPWNLQETVDLDQSATAFIERMTNFDTYLPSEKVLPKHSLLYEKFMVFNELTKISYTDDRGIKANFSGKEKEKIFDYLFKTRRKVKKKDIIQFYRNEYNTEIVTLSGLEEDQFNASFSTYQDLLKCGLTRAELDHPDNAEKLEDIIKILTIFEDRQRIRTQLSTFKGQFSAEVLKKLERKHYTGWGRLSKKLINGIYDKESGKTILDYLVKDDGVSKHYNRNFMQLINDSQLSFKNAIQKAQSSEHEETLSETVNELAGSPAIKKGIYQSLKIVDELVAIMGYAPKRIVVEMARENQTTSTGKRRSIQRLKIVEKAMAEIGSNLLKEQPTTNEQLRDTRLFLYYMQNGKDMYTGDELSLHRLSHYDIDHIIPQSFMKDDSLDNLVLVGSTENRGKSDDVPSKEVVKDMKAYWEKLYAAGLISQRKFQRLTKGEQGGLTLEDKAHFIQRQLVETRQITKNVAGILDQRYNAKSKEKKVQIITLKASLTSQFRSIFGLYKVREVNDYHHGQDAYLNCVVATTLLKVYPNLAPEFVYGEYPKFQTFKENKATAKAIIYTNLLRFFTEDEPRFTKDGEILWSNSYLKTIKKELNYHQMNIVKKVEVQKGGFSKESIKPKGPSNKLIPVKNGLDPQKYGGFDSPIVAYTVLFTHEKGKKPLIKQEILGITIMEKTRFEQNPILFLEEKGFLRPRVLMKLPKYTLYEFPEGRRRLLASAKEAQKGNQMVLPEHLLTLLYHAKQCLLPNQSESLAYVEQHQPEFQEILERVVDFAEVHTLAKSKVQQIVKLFEANQTADVKEIAASFIQLMQFNAMGAPSTFKFFQKDIERARYTSIKEIFDATIIYQSTTGLYETRRKVVD

SEQ ID NO: 208 - protein, 1337 aa, Enterococcus faecalis
MKKDYVIGLDIGTNSVGWAVMTEDYQLVKKKMPIYGNTEKKKIKKNFWGVRLFEEGHTAEDRRLKRTARRRISRRRNRLRYLQAFFEEAMTALDENFFARLQESFLVPEDKKWHRHPIFAKLEDEVAYHETYPTIYHLRKKLADSSEQADLRLIYLALAHIVKYRGHFLIEGKLSTENISVKDQFQQFMVIYNQTFVNGESRLVSAPLPESVLIEEELTEKASRTKKSEKVLQQFPQEKANGLFGQFLKLMVGNKADFKKVFGLEEEAKITYASESYEEDLEGILAKVGDEYSDVFLAAKNVYDAVELSTILADSDKKSHAKLSSSMIVRFTEHQEDLKNFKRFIRENCPDEYDNLFKNEQKDGYAGYIAHAGKVSQLKFYQYVKKIIQDIAGAEYFLEKIAQENFLRKQRTFDNGVIPHQIHLAELQAIIHRQAAYYPFLKENQKKIEQLVTFRIPYYVGPLSKGDASTFAWLKRQSEEPIRPWNLQETVDLDQSATAFIERMTNFDTYLPSEKVLPKHSLLYEKFMVFNELTKISYTDDRGIKANFSGKEKEKIFDYLFKTRRKVKKKDIIQFYRNEYNTEIVTLSGLEEDQFNASFSTYQDLLKCGLTRAELDHPDNAEKLEDIIKILTIFEDRQRIRTQLSTFKGQFSAEVLKKLERKHYTGWGRLSKKLINGIYDKESGKTILDYLIKDDGVSKHYNRNFMQLINDSQLSFKNAIQKAQSSEHEETLSETVNELAGSPAIKKGIYQSLKIVDELVAIMGYAPKRIVVEMARENQTTSTGKRRSIQRLKIVEKAMAEIGSNLLKEQPTTNEQLRDTRLFLYYMQNGKDMYTGDELSLHRLSHYDIDHIIPQSFMKDDSLDNLVLVGSTENRGKSDDVPSKEVVKKMKAYWEKLYAAGLISQRKFQRLTKGEQGGLTLEDKAHFIQRQLVETRQITKNVAGILDQRYNAKSKEKKVQIITLKASLTSQFRSIFGLYKVREVNDYHHGQDAYLNCVVATTLLKVYPNLAPEFVYGEYPKFQAFKENKAMAKAIIYTNLLRFFTEDEPRFTKDGEILWSNSYLKTIKKELNYHQMNIVKKVEVQKGGFSKESIKPKGPSNKLIPVKNGLDPQKYGGFDSPVVAYTVLFTHEKGKKPLIKQEILGITIMEKTRFEQNPILFLEEKGFLRPRVLMKLPKYTLYEFPEGRRRLLASAKEAQKGNQMVLPERLLTLLYHAKQCLLPNQSESLAYVEQHQPEFQEILERVVDFAEVHTLAKSKVQQIVKLFEANQTADVKEIAASFIQLMQFNAMGAPSTFKFFQKDIERARYTSIKEIFDATIIYQSTTGLYETRRKVVD

SEQ ID NO: 209 - protein, 1337 aa, Enterococcus faecalis
MKKDYVIGLDIGTNSVGWAVMTEDYQLVKKKMPIYGNTEKKKIKKNFWGVRLFEEGHTAEDRRLKRTARRRISRRRNRLRYLQAFFEEAMTALDENFFARLQESFLVPEDKKWHRHPIFAKLEDEVAYHETYPTIYHLRKKLADSSEQADLRLIYLALAHIVKYRGHFLIEGKLSTENISVKEQFQQFMIIYNQTFVNGESRLVSAPLPESVLIEEELTEKASRTKKSEKVLQQFPQEKANGLFGQFLKLMVGNKADFKKVFGLEEEAKITYASESYEEDLEGILAKVGDEYSDVFLAAKNVYDAVELSTILADSDKKSHAKLSSSMIVRFTEHQEDLKKFKRFIRENCPDEYDNLFKNEQKDGYAGYIAHAGKVSQLKFYQYVKKIIQDIAGAEYFLEKIAQENFLRKQRTFDNGVIPHQIHLAELQAIIHRQAAYYPFLKENQEKIEQLVTFRIPYYVGPLSKGDASTFAWLKRQNEKPIRPWNLQETVDLDQSATAFIERMTNFDTYLPSEKVLPKHSLLYEKFMVFNELTKISYTDDRGIKANFSGKEKEKIFDYLFKTRRKVKKKDIIQFYRNEYNTEIVTLSGLEEDQFNASFSTYQDLLKCGLTRAELDHPDNAEKLEDIIKILTIFEDRQRIRTQLSTFKGQFSAEVLKKLERKHYTGWGRLSKKLINGIYDKESGKTILDYLIKDDGVSKHYNRNFMQLINDSQLSFKNAIQKAQSSEHEETLSETVNELAGSPAIKKGIYQSLKIVDELVAIMGYAPKRIVVEMARENQTTSTGKRRSIQRLKIVEKAMAEIGSNLLKEQPTTNEQLRDTRLFLYYMQNGKDMYTGDELSLHRLSHYDIDHIIPQSFMKDDSLDNLVLVGSTENRGKSDDVPSKEVVKKMKAYWEKLYAAGLISQRKFQRLTKGEQGGLTLEDKAHFIQRQLVETRQITKNVAGILDQRYNAKSKEKKVQIITLKASLTSQFRSIFGLYKVREVNDYHHGQDAYLNCVVATTLLKVYPNLAPEFVYGEYPKFQAFKENKATAKAIIYTNLMRFFTEVEPRFTKDGEILWSNSYLKTIKKELNYHQMNIVKKVEVQKGGFSKESIKPKGPSNKLIPVKNGLDPQKYGGFDSPVVAYTVLFTHEKGKKPLIKQEILGITIMEKTKFEQNPILFLEEKGFLRPRVLMKLPKYTLYEFPEGRRRLLASAKEAQKGNQMVLPEHLLTLLYHAKQCLLPNQSESLAYVEQHQPEFQEILERVVDFAEVHTLAKSKVQQIVKLFETNQTADVKEIAASFIQLMQFNAMGAPSTFKFFQKDIERARYTSIKEIFDATIIYQSTTGLYETRRKVVD

SEQ ID NO: 210 - protein, 1337 aa, Enterococcus faecalis
MKKDYVIGLDIGTNSVGWAVMTEDYQLVKKKMPIYGNTEKKKIKKNFWGVRLFEEGHTAEDRRLKRTARRRISRRRNRLRYLQAFFEEAMTALDENFFARLQESFLVPEDKKWHRHPIFAKLEDEVAYHETYPTIYHLRKKLADSSEQADLRLIYLALAHIVKYRGHFLIEGKLSTENISVKEQFQQFMIIYNQTFVNGESRLVSAPLPESVLIEEELTEKASRTKKSEKVLQQFPQEKANGLFGQFLKLMVGNKADFKKVFGLEEEAKITYASESYEEDLEGILAKVGDEYSDVFLAAKNVYDAVELSTILADSDKKSHAKLSSSMIVRFTEHQEDLKNFKRFIRENCPDEYDNLFKNEQKDGYAGYIAHAGKVSQLKFYQYVKKIIQDIAGAEYFLEKIAQENFLRKQRTFDNGVIPHQIHLAELQAIIHRQAAYYPFLKENQKKIEQLVTFRIPYYVGPLSKGDASTFAWLKRQSEEPIRPWNLQETVDLDQSATAFIERMTNFDTYLPSEKVLPKHSLLYEKFMVFNELTKISYTDDRGIKANFSGKEKEKIFDYLFKTRRKVKKKDIIQFYRNEYNTEIVTLSGLEEDQFNASFSTYQDLLKCGLTRAELDHPDNAEKLEDIIKILTIFEDRQRIRTQLSTFKGQFSEEVLKKLERKHYTGWGRLSKKLINGIYDKESGKTILDYLIKDDGVSKHYNRNFMQLINDSQLSFKNAIQKAQSSEHEETLSETVNELAGSPAIKKGIYQSLKIVDELVAIMGYAPKRIVVEMARENQTTSTGKRRSIQRLKIVEKAMAEIGSNLLKEQPTTNEQLRDTRLFLYYMQNGKDMYTGDELSLHRLSHYDIDHIIPQSFMKDDSLDNLVLVGSTENRGKSDDVPSKEVVKKMKAYWEKLYAAGLISQRKFQRLTKGEQGGLTLEDKAHFIQRQLVETRQITKNVAGILDQRYNAKSKEKKVQIITLKASLTSQFRSIFGLYKVREVNDYHHGQDAYLNCVVATTLLKVYPNLAPEFVYGEYPKFQAFKENKATAKAIIYTNLLRFFTEDEPRFTKDGEILWSNSYLKTIKKELNYHQMNIVKKVEVQKGGFSKESIKPKGPSNKLIPVKNGLDPQKYGGFDSPVVAYTVLFTHEKGKKPLIKQEILGITIMEKTRFEQNPILFLEEKGFLRPRVLMKLPKYTLYEFPEGRRRLLASAKEAQKGNQMVLPEHLLTLLYHAKQCLLPNQSESLAYVEQHQPEFQEILERVVDFAEVHTLAKSKVQQIVKLFEANQTADVKEIAASFIQLMQFNAMGAPSTFKFFQKDIERARYTSIKEIFDATIIYQSTTGLYETRRKVVD

SEQ ID NO: 211 - protein, 1339 aa, Enterococcus faecium
MKKEYTIGLDIGTNSVGWSVLTDDYRLVSKKMKVAGNTEKSSTKKNFWGVRLFDEGQTAEARRSKRTARRRLARRRQRILELQKIFAPEILKIDEHFFARLNESFLVLDEKKQSRHPVFATIKQEKSYHQTYPTIYHLRQALADSSEKADIRLVYLAMAHLLKYRGHFLIEGELNTENSSVTETFRQFLSTYNQQFSEADDKQTEKLDEAVDCSFVFTEKMSKTKKAETLLKYFPHEKSNGYLSQFIKLMVGNQGNFKNVFGLEEAKLQFSKETYEEDLEELLEKIGDDYIDLFVQAKNVYDAVLLSEILSDSTKNTRAKLSAGMIRRYDAHKEDLVLLKRFVKENLPKKYRAFFGDNSVNGYAGYIEGHATQEDFYKFVKKELTGIRGSEVFLTKIEQENFLRKQRTFDNGVIPHQIHLTELRAIIANQKKHYPFLKEEQEKLESLLTFKIPYYVGPLAKKQENSPFAWLIRKSEEKIKPWNLPEIVDMEGSAVRFIERMINTDMYMPHNKVLPKNSLLYQKFSIYNELTKVRYQDERGQMNYFSSIEKKEIFHELFEKNRKVTKKDLQEFLYLKYDIKHAELSGIEKAFNASYTTYHDFLTMSENKREMKQWLEDPELASMFEEIIKTLTVFEDREMIKTRLSHHEATLGKHIIKKLTKKHYTGWGRLSKELIQGIRDKQSNKTILDYLINDDDFPHHRNRNFMQLINDDSLSFKKEIKKAQMITDTENLEEIVKELTGSPAIKKGILQSLKIVDEIVGIMGYEPANIVVEMARENQTTGRGLKSSRPRLKALEESLKDFGSQLLKEYPTDNSSLQKDRLYLYYLQNGRDMYTGAPLDIHRLSDYDIDHIIPRSFTTDNSIDNKVLVSSKENRLKKDDVPSEKVVKKMRSFWYDLYSSKLISKRKLDNLTKIKLTEEDKAGFIKRQLVETRQITKHVAGILHHRFNKAEDTNEPIRKVRIITLKSALVSQFRNRFGIYKVREINEYHHAHDAYLNGVVALALLKKYPQLAPEFVYGEYLKFNAHKANKATVKKEFYSNIMKFFESDTPVCDENGEIFWDKSKSIAQVKKVINHHHMNIVKKTEIQKGGFSKETVEPKKDSSKLLPRKNNWDPAKYGGLGSPNVAYTVAFTYEKGKARKRTNALEGITIMEREAFEQSPVLFLKNKGYEQAEIEMKLPKYALFELENGRKRMVASNKEAQKANSFLLPEHLVTLLYHAKQYDEISHKESFDYVNEHHKEFSEVFARVLEFAGKYTLAEKNIEKLEKIYKENQTDDLAKLASSFVNLMQFNAMGAPADFKFFDVTIPRKRYTSLTEIWQSTIIHQSITGLYETRIRMGK

SEQ ID NO: 212 - protein, 1340 aa, Enterococcus faecium
MKKEYTIGLDIGTNSVGWSVLTDDYRLVSKKMKVAGNTEKSSTKKNFWGVRLFDEGQTAEARRSKRTARRRLARRRQRILELQKIFAPEILKIDEHFFARLNESFLVPDEKKQSRHPVFATIKQEKSYHQTYPTIYHLRQALADSSEKADIRLVYLAMAHLLKYRGHFLIEGELNTENSSVTETFRQFLSTYNQQFSEAGDKQTEKLDEAVDCSFVFTEKMSKTKKAETLLKYFPHEKSNGYLSQFIKLMVGNQGNFKNVFGLEEEAKLQFSKETYEEDLEELLEKIGDDYIDLFVQAKNVYDAVLLSEILSDSTKNTRAKLSAGMIRRYDAHKEDLVLLKRFVKENLPKKYRAFFGDNSVNGYAGYIEGHATQEAFYKFVKKELTGIRGSEVFLTKIEQENFLRKQRTFDNGVIPHQIHLSELRAIIANQKKHYPFLKEEQEKLESLLTFKIPYYVGPLAKKQENSPFAWLIRKSEEKIKPWNLPEIVDMEGSAVRFIERMINTDMYMPHNKVLPKNSLLYQKFSIYNELTKVRYQDERGQMNYFSSIEKKEIFHELFEKNRKVTKKDLQEFLYLKYDIKHAELSGIEKAFNASYTTYHDFLTMSENKREMKQWLEDPELASMFEEIIKTLTVFEDREMIKTRLSHHEATLGKHIIKKLTKKHYTGWGRLSKELIQGIRDKQSNKTILDYLINDDDFPHHRNRNFMQLINDDSLSFKKEIKKAQMITDTENLEEIVKELTGSPAIKKGILQSLKIVDEIVGIMGYEPANIVVEMARENQTTGRGLKSSRPRLKALEESLKDFGSQLLKEYPTDNSSLQKDRLYLYYLQNGRDMYTGAPLDIHRLSDYDIDHIIPRSFTTDNSIDNKVLVSSKENRLKKDDVPSEKVVKKMRSFWYDLYSSKLISKRKLDNLTKIKLTEEDKAGFIKRQLVETRQITKHVAGILHHRFNKAEDTNDPIRKVRIITLKSALVSQFRNRFGIYKVREINEYHHAHDAYLNGVVALALLKKYPQLAPEFVYGEYLKFNAHKANKATVKKEFYSNIMKFFESDTPVCDENGEIFWDKSKSIAQVKKVINHHHMNIVKKTEIQKGGFSKETVEPKKDSSKLLPRKNNWDPAKYGGLGSPNVAYTVAFTYEKGKARKRTNALEGITIMEREAFEQSPVLFLKNKGYEQAEIEMKLPKYALFELENGRKRMVASNKEAQKANSFLLPEHLVTLLYHAKQYDEISHKESFDYVNEHHKEFSEVFARVLEFAGKYTLAEKNIEKLEKIYKENQTDDLAKLASSFVNLMQFNAMGAPADFKFFDVTIPRKRYTSLTEIWQSTIIHQSITGLYETRIRMGK

SEQ ID NO: 213 - protein, 1340 aa, Enterococcus faecium
MKKEYTIGLDIGTNSVGWSVLTDDYRLVSKKMKVAGNTEKSSTKKNFWGVRLFDEGQTAEARRSKRTARRRLARRRQRILELQKIFAPEILKIDEHFFARLNESFLVLDEKKQSRHPVFATIKQEKSYHQTYPTIYHLRQALADSSEKADIRLVYLAMAHLLKYRGHFLIEGELNTENSSVTETFRQFLSTYNQQFSEADDKQTEKLDEAVDCSFVFTEKMSKTKKAETLLKYFPHEKSNGYLSQFIKLMVGNQGNFKNVFGLEEEAKLQFSKETYEEDLEELLEKIGDDYIDLFVQAKNVYDAVLLSEILSDSTKNTRAKLSAGMIRRYDAHKEDLVLLKRFVKENLPKKYRAFFGDNSVNGYAGYIEGHATQEDFYKFVKKELTGIRGSEVFLTKIEQENFLRKQRTFDNGVIPHQIHLTELRAIIANQKKHYPFLKEEQEKLESLLTFKIPYYVGPLAKKQENSPFAWLIRKSEEKIKPWNLPEIVDMEGSAVRFIERMNNTDMYIPHNKVLPKNSLLYQKFSIYNELTKVRYQDERGQMNYFSSIEKKEIFHELFEKNRKVTKKDLQEFLYLKYDIKHAELSGIEKAFNASYTTYHDFLTMSENKREMKQWLEDPELASMFEEIIKTLTVFEDREMIKTRLSHHEATLGKHIIKKLTKKHYTGWGRLSKELIQGIRDKQSNKTILDYLINDDDFPHHRNRNFMQLINDDSLSFKKEIKKAQMITDTENLEEIVKELTGSPAIKKGILQSLKIVDEIVGIMGYEPANIVVEMARENQTTGRGLKSSRPRLKALEESLKDFGSQLLKEYPTDNSSLQKDRLYLYYLQNGRDMYTGAPLDIHRLSDYDIDHIIPRSFTTDNSIDNKVLVSSKENRLKKDDVPSEKVVKKMRSFWYDLYSSKLISKRKLDNLTKIKLTEEDKAGFIKRQLVETRQITKHVAGILHHRFNKAEDTNEPIRKVRIITLKSALVSQFRNRFGIYKVREINEYHHAHDAYLNGVVALALLKKYPQLAPEFVYGEYLKFNAHKANKATVKKEFYSNIMKFFESDTPVCDENGEIFWDKSKSIAQVKKVINHHHMNIVKKTEIQKGGFSKETVEPKKDSSKLLPRKNNWDPAKYGGLGSPNVAYTVAFTYEKGKARKRTNALEGITIMEREAFEQSPVLFLKNKGYEQAEIEMKLPKYALFELENGRKRMVASNKEAQKANSFLLPEHLVTLLYHAKQYDEISHKESFDYVNEHHKEFSEVFARVLEFAGKYTLAEKNIEKLEKIYKENQTDDLAKLASSFVNLMQFNAMGAPADFKFFDVTIPRKRYTSLTEIWQSTIIHQSITGLYETRIRMGK

SEQ ID NO: 214 - protein, 1340 aa, Enterococcus sp.
MKKEYTIGLDIGTNSVGWSVLTDDYRLVSKKMKVAGNTEKSSTKKNFWGVRLFDEGQTAEARRSKRTARRRLARRRQRILELQKIFAPEILKIDEHFFARLNESFLVLDEKKQSRHPVFATIKQEKSYHQTYPTIYHLRQALADSSEKADIRLVYLAMAHLLKYRGHFLIEGELNTENSSVTETFRQFLSTYNQQFSEADDKQTEKLDEAVDCSFVFTEKMSKTKKAETLLKYFPHEKSNGYLSQFIKLMVGNQGNFKNVFGLEEEAKLQFSKETYEEDLEELLEKIGDDYIDLFVQAKNVYDAVLLSEILSDSTKNTRAKLSAGMIRRYDAHKEDLVLLKRFVKENLPKKYRAFFGDNSVNGYAGYIEGHATQEDFYKFVKKELTGIRGSEVFLTKIEQENFLRKQRTFDNGVIPHQIHLTELRAIIANQKKHYPFLKEEQEKLESLLTFKIPYYVGPLAKKQENSPFAWLIRKSEEKIKPWNLPEIVDMEGSAVRFIERMINTDMYIPHNKVLPKNSLLYQKFSIYNELTKVRYQDERGQMNYFSSIEKKEIFHELFEKNRKVTKKDLQEFLYLKYDIKHAELSGIEKAFNASYTTYHDFLTMSENKREMKQWLEDPELASMFEEIIKTLTVFEDREMIKTRLSHHEATLGKHIIKKLTKKHYTGWGRLSKELIQGIRDKQSNKTILDYLINDDDFPHHRNRNFMQLINDDSLSFKKEIKKAQMITDTENLEEIVKELTGSPAIKKGILQSLKIVDEIVGIMGYEPANIVVEMARENQTTGRGLKSSRPRLKALEESLKDFGSQLLKEYPTDNSSLQKDRLYLYYLQNGRDMYTGAPLDIHRLSDYDIDHIIPRSFTTDNSIDNKVLVSSKENRLKKDDVPSEKVVKKMRSFWYDLYSSKLISKRKLDNLTKIKLTEEDKAGFIKRQLVETRQITKHVAGILHHRFNKAEDTNEPIRKVRIITLKSALVSQFRNRFGIYKVREINEYHHAHDAYLNGVVALALLKKYPQLAPEFVYGEYLKFNAHKANKATVKKEFYSNIMKFFESDTPVCDENGEIFWDKSKSIAQVKKVINHHHMNIVKKTEIQKGGFSKETVEPKKDSSKLLPRKNNWDPAKYGGLGSPNVAYTVAFTYEKGKARKRTNALEGITIMEREAFEQSPVLFLKNKGYEQAEIEMKLPKYALFELENGRKRMVASNKEAQKANSFLLPEHLVTLLYHAKQYDEISHKESFDYVNEHHKEFSEVFARVLEFAGKYTLAEKNIEKLEKIYKENQTDDLAKLASSFVNLMQFNAMGAPADFKFFDVTIPRKRYTSLTEIWQSTIIHQSITGLYETRIRMGK

SEQ ID NO: 215 - protein, 1339 aa, Enterococcus faecium
MKKEYTIGLDIGTNSVGWSVLTDDYRLVSKKMKVAGNTEKSSTKKNFWGVRLFDEGQTAEARRSKRTARRRLARRRQRILELQKIFAPEILKIDEHFFARLNESFLVLDEKKQSRHPVFATIKQEKSYHQTYPTIYHLRQALADSSEKADIRLVYLAMAHLLKYRGHFLIEGELNTENSSVTETFRQFLSTYNQQFSEADDKQTEKLDEAVDCSFVFTEKMSKTKKAETLLKYFPHEKSNGYLSQFIKLMVGNQGNFKNVFGLEEAKLQFSKETYEEDLEELLEKIGDDYIDLFVQAKNVYDAVLLSEILSDSTKNTRAKLSAGMIRRYDAHKEDLVLLKRFVKENLPKKYRAFFGDNSVNGYAGYIEGHATQEDFYKFVKKELTGIRGSEVFLTKIEQENFLRKQRTFDNGVIPHQIHLTELRAIIANQKKHYPFLKEEQEKLESLLTFKIPYYVGPLAKKQENSPFAWLIRKSEEKIKPWNLPEIVDMEGSAVRFIERMINTDMYIPHNKVLPKNSLLYQKFSIYNELTKVRYQDERGQMNYFSSIEKKEIFHELFEKNRKVTKKDLQEFLYLKYDIKHAELSGIEKAFNASYTTYHDFLTMSENKREMKQWLEDPELASMFEEIIKTLTVFEDREMIKTRLSHHEATLGKHIIKKLTKKHYTGWGRLSKELIQGIRDKQSNKTILDYLINDDDFPHHRNRNFMQLINDDSLSFKKEIKKAQMITDTENLEEIVKELTGSPAIKKGILQSLKIVDEIVGIMGYEPANIVVEMARENQTTGRGLKSSRPRLKALEESLKDFGSQLLKEYPTDNSSLQKDRLYLYYLQNGRDMYTGAPLDIHRLSDYDIDHIIPRSFTTDNSIDNKVLVSSKENRLKKDDVPSEKVVKKMRSFWYDLYSSKLISKRKLDNLTKIKLTEEDKAGFIKRQLVETRQITKHVAGILHHRFNKAEDTNEPIRKVRIITLKSALVSQFRNRFGIYKVREINEYHHAHDAYLNGVVALALLKKYPQLAPEFVYGEYLKFNAHKANKATVKKEFYSNIMKFFESDTPVCDENGEIFWDKSKSIAQVKKVINHHHMNIVKKTEIQKGGFSEETVEPKKDSSKLLPRKNNWDPAKYGGLGSPNVAYTVAFTYEKGKARKRTNALEGITIMEREAFEQSPVLFLKNKGYEQAEIEMKLPKYALFELENGRKRMVASNKEAQKANSFLLPEHLVTLLYHAKQYDEISHKESFDYVNEHHKEFSEVFARVLEFAGKYTLAEKNIEKLEKIYKENQTDDLAKLASSFVNLMQFNAMGAPADFKFFDVTIPRKRYTSLTEIWQSTIIHQSITGLYETRIRMGK

SEQ ID NO: 216 - protein, 1340 aa, Enterococcus faecium
MKKEYTIGLDIGTNSVGWSVLTDDYRLVSKKMKVAGNTEKSSTKKNFWGVRLFDEGQTAEARRSKRTARRRLARRRQRILELQKIFAPEILKIDEHFFARLNESFLVLDEKKQSRHPVFATIKQEKSYHQTYPTIYHLRQALADSSEKADIRLVYLAMAHLLKYRGHFLIEGELNTENSSVTETFRQFLSTYNQQFSEADDKQTEKLDEAVDCSFVFTEKMSKTKKAETLLKYFPHEKSNGYLSQFIKLMVGNQGNFKNVFGLEEEAKLQFSKETYEEDLEELLEKIGDDYIDLFVQAKNVYDAVLLSEILSDSTKNTRAKLSAGMIRRYDAHKEDLVLLKRFVKENLPKKYRAFFGDNSVNGYAGYIEGHATQEDFYKFVKKELTGIRGSEVFLTKIEQENFLRKQRTFDNGVIPHQIHLTELRAIIANQKKHYPFLKEEQEKLESLLTFKIPYYVGPLAKKQENSPFAWLIRKSEEKIKPWNLPEIVDMEGSAVRFIERMINTDMYMPHNKVLPKNSLLYQKFSIYNELTKVRYQDERGQMNYFSSIEKKEIFHELFEKNRKVTKKDLQEFLYLKYDIKHAELSGIEKAFNASYTTYHDFLTMSENKREMKQWLEDPELASMFEEIIKTLTVFEDREMIKTRLSHHEATLGKHIIKKLTKKHYTGWGRLSKELIQGIRDKQSNKTILDYLINDDDFPHHRNRNFMQLINDDSLSFKKEIKKAQMITDTENLEEIVKELTGSPAIKKGILQSLKIVDEIVGIMGYEPANIVVEMARENQTTGRGLKSSRPRLKALEESLKDFGSQLLKEYPTDNSSLQKDRLYLYYLQNGRDMYTGAPLDIHRLSDYDIDHIIPRSFTTDNSIDNKVLVSSKENRLKKDDVPSEKVVKKMRSFWYDLYSSKLISKRKLDNLTKIKLTEEDKAGFIKRQLVETRQITKHVAGILHHRFNKAEDTNEPIRKVRIITLKSALVSQFRNRFGIYKVREINEYHHAHDAYLNGVVALALLKKYPQLAPEFVYGEYLKFNAHKANKATVKKEFYSNIMKFFESDTPVCDENGEIFWDKSKSIAQVKKVINHHHMNIVKKTEIQKGGFSKETVEPKKDSSKLLPRKNNWDPAKYGGLGSPNVAYTVAFTYEKGKARKRTNALEGITIMEREAFEQSPVLFLKNKGYEQAEIEMKLPKYALFELENGRKRMVASNKEAQKANSFLLPEHLVTLLYHAKQYDEISHKESFDYVNEHHKEFSEVFARVLEFAGKYTLAEKNIEKLEKIYKENQTDDLAKLASSFVNLMQFNAMGAPADFKFFDVTIPRKRYTSLTEIWQSTIIHQSITGLYETRIRMGK

SEQ ID NO: 217 - protein, 1340 aa, Enterococcus faecium
MKKEYTIGLDIGTNSVGWSVLTDDYRLVSKKMKVAGNTEKSSTKKNFWGVRLFDEGQTAEARRSKRTARRRLARRRQRILELQKIFAPEILKIDEHFFARLNESFLVLDEKKQSRHPVFATIKQEKSYHQTYPTIYHLRQALADSSEKADIRLVYLAMAHLLKYRGHFLIEGELNTENSSVTETFRQFLSTYNQQFSEADDKQTEKLDEAVDCSFVFTEKMSKTKKAETLLKYFPHEKSNGYLSQFIKLMVGNQGNFKNVFGLEEEAKLQFSKETYEEDLEELLEKIGDDYIDLFVQAKNVYDAVLLSEILSDSTKNTRAKLSAGMIRRYDAHKEDLVLLKRFVKENLPKKYRAFFGDNSVNGYAGYIEGHATQEDFYKFVKKELTGIRGSEVFLTKIEQENFLRKQRTFDNGVIPHQIHLTELRAIIANQKKHYPFLKEEQEKLESLLTFKIPYYVGPLAKKQENSPFAWLIRKSEEKIKPWNLPEIVDMEGSAVRFIERMINTDMYIPHNKVLPKNSLLYQKFSIYNELTKVRYQDERGQMNYFSSIEKKEIFHELFEKNRKVTKKDLQEFLYLKYDIKHAELSGIEKAFNASYTTYHDFLTMSENKREMKQWLEDPELASMFEEIIKTLTVFEDREMIKTRLSHHEATLGKHIIKKLTKKHYTGWGRLSKELIQGIRDKQSNKTILDYLINDDDFPHHRNRNCMQLINDDSLSFKKEIKKAQMITDTENLEEIVKELTGSPAIKKGILQSLKIVDEIVGIMGYEPANIVVEMARENQTTGRGLKSSRPRLKALEESLKDFGSQLLKEYPTDNSSLQKDRLYLYYLQNGRDMYTGAPLDIHRLSDYDIDHIIPRSFTTDNSIDNKVLVSSKENRLKKDDVPSEKVVKKMRSFWYDLYSSKLISKRKLDNLTKIKLTEEDKAGFIKRQLVETRQITKHVAGILHHRFNKAEDTNEPIRKVRIITLKSALVSQFRNRFGIYKVREINEYHHAHDAYLNGVVALALLKKYPQLAPEFVYGEYLKFNAHKANKATVKKEFYSNIMKFFESDTPVCDENGEIFWDKSKSIAQVKKVINHHHMNIVKKTEIQKGGFSKETVEPKKDSSKLLPRKNNWDPTKYGGLGSPNVAYTVAFTYEKGKARKRTNALEGITIMEREAFEQSPVLFLKNKGYEQAEIEMKLPKYALFELENGRKRMVASNKEAQKANSFLLPEHLVTLLYHAKQYDEISHKESFDYVNEHHKEFSEVFARVLEFAGKYTLAEKNIEKLEKIYKENQTDDLAKLASSFVNLMQFNAMGAPADFKFFDVTIPRKRYTSLTEIWQSTIIHQSITGLYETRIRMGK

SEQ ID NO: 218 - protein, 1336 aa, Enterococcus hirae
MTKDYTIGLDIGTNSVGWAVLTDDYQLMKRKMSVHGNTEKKKIKKNFWGARLFDEGQTAEFRRTKRTNRRRLARRKYRLSKLQDLFAEELCKQDDCFFVRLEESFLVPEEKQYKPASIFPTLEEEKEYYQKYPTIYHLRQKLVDSTEKEDLRLVYLALAHLLKYRGHFLFEGDLDTENTSIEESFRVFLEQYSKQSDQPLIVHQPVLTILTDKLSKTKKVEEILKYYPTEKINSFFAQCLKLIVGNQANFKRIFDLEAEVKLQFSKETYEEDLESLLEKIGDEYLDIFLQAKKVHDAILLSEIISSTVKHTKAKLSSGMVERYERHKADLAKFKQFVKENVPQKATVFFKDTTKNGYAGYIKGKTTQEEFYKFVKKELSGVVGSEPFLEKIDQETFLLKQRTYTNGVIPHQVHLIELKAIIDQQKQHYPFLEEAGPKIIALFKFRIPYYVGPLAKEQEASSFAWIERKTAEKINPWNFSEVVDIEKSAMRFIQRMTKQDTYLPTEKVLPKNSLLYQKYMIFNELTKVSYKDERGVKQYFSGDEKQQIFKQLFQKERGKITVKKLQNFLYTHYHIENAQIFGIEKAFNASYSTYHDFMKLAKTNQKAMQEWLEQPEMEPIFEDIVKILTIFEDRQMIKHQLSKYQEVFGEKLLKEFARKHYTGWGRFSAKLIHGIRDRKTNKTILDYLINDDDVPANRNRNLMQLINDEHLSFKEEIAKATVFSKHKSLVDVIQDLPGSPAIKKGIWQSLKIVEELIAIIGYKPKNIVIEMARENQKTHRTSPRLKALENGLKQIGSTLLKEQPTDNKALQKERLYLYYLQNGRDMYTGEPLEIENLHQYEVDHIIPRSFIVDNSIDDKVLVASKQNQKKRDDVPKKQIVNEQRIFWNQLKEAKLISTKKYAYLTKIELTPEDKARFIQRQLVETRQITKHVANILHQSFNQEEEGTDCDGVQIITLKATLTSQFRQTFGLYKVREINPHHHAHDAYLNGFIANVLLKRYPKLAPEFVYGKYVKYSLARENKATAKKEFYSNILKFLESDEPFCDENGEIYWEKSHHLPRIKKVLSSHQVNVVKKVEQQKGGFYKETVNSKEKPDKLIERKNNWDVTKYGGFGSPVIAYAIAFVYAKGKTQKKTRAIEGITIMEQAAFEKDPTTFLKEKGFPQVTEFIKLPKYTLFEFDNGRRRFLASHKESQKGNPFILSDQLVTLLYHAQHYDKITYQESFDYVNTHLSDFSAILTEVLAFAEKYTLADKNIERIQELYEENKYGETSMIAQSFLQLLQFNAIGAPADFKFFGVTIPRKRYTSLTEIWDATIIYQSVTGLYETRIRMGDLWAGEQ

SEQ ID NO: 219 - protein, 1340 aa, Enterococcus faecium
MKKEYTIGLDIGTNSVGWSVLTDDYRLVSKKMKVAGNTEKSSTKKNFWGVRLFDEGQTAEARRSKRTARRRLARRRQRILELQKIFAPEILKIDEHFFARLNESFLVLDEKKQSRHPVFATIKQEKSYHQTYPTIYHLRQALADSSEKADIRLVYLAMAHLLKYRGHFLIEGELNTENSSVTETFRQFLSTYNQQFSEADDKQTEKLDEAVDCSFVFTEKMSKTKKAETLLKYFPHEKSNGYLSQFIKLMVGNQGNFKNVFGLEEEAKLQFSKETYEEDLEELLEKIGDDYIDLFVQAKNVYDAVLLSEILSDSTKNTRAKLSAGMIRRYDAHKEDLVLLKRFVKENLPKKYRAFFGDNSVNGYAGYIEGHATQEDFYKFVKKELTGIRGSEVFLTKIEQENFLRKQRTFDNGVIPHQIHLTELRAIIANQKKHYPFLKEEQEKLESLLTFKIPYYVGPLAKKQENSPFAWLIRKSEEKIKPWNLPEIVDMEGSAVRFIERMINTDMYMPHNKVLPKNSLLYQKFSIYNELTKVRYQDERGQMNYFSSIEKKEIFHELFEKNRKVTKKDLQEFLYLKYDIKHAELSGIEKAFNASYTTYHDFLTMSENKREMEQWLEDPELASMFEEIIKTLTVFEDREMIKTRLSHHEATLGKHIIKKLTKKHYTGWGRLSKELIQGIRDKQSNKTILDYLINDDDFPHHRNRNFMQLINDDSLSFKKEIKKAQMITDTENLEEIVKELTGSPAIKKGILQSLKIVDEIVGIMGYEPANIVVEMARENQTTGRGLKSSRPRLKALEESLKDFGSQLLKEYPTDNSSLQKDRLYLYYLQNGRDMYTGAPLDIHRLSDYDIDHIIPRSFTTDNSIDNKVLVSSKENRLKKDDVPSEKVVKKMRSFWYDLYSSKLISKRKLDNLTKIKLTEEDKAGFIKRQLVETRQITKHVAGILHHRFNKAEDTNEPIRKVRIITLKSALVSQFRNRFGIYKVREINEYHHAHDAYLNGVIALALLKKYPQLAPEFVYGEYLKFNAHKANKATVKKEFYSNIMKFFESDTPVCDENGEIFWDKSKSIAQVKKVINHHHMNIVKKTEIQKGGFSKETVEPKKDSSKLLPRKNNWDPAKYGGLGSPNVAYTVAFTYEKGKARKRTNALEGITIMEREAFEQSPVLFLKNKGYEQAEIEMKLPKYALFELENGRKRMVASNKEAQKANSFLLPEHLVTLLYHAKQYDEISHKESFDYVNEHHKEFSEVFARVLEFAGKYTLAEKNIEKLEKIYKENQTDDLAKLASSFVNLMQFNAMGAPADFKFFDVTIPRKRYTSLTEIWQSTIIHQSITGLYETRIRMGK

SEQ ID NO: 220 - protein, 1336 aa, Enterococcus hirae
MTKDYTIGLDIGTNSVGWAVLTDDYQLMKRKMSVHGNTEKKKIKKNFWGARLFDEGQTAEFRRTKRTNRRRLARRKYRLSKLQDLFAEELCKQDDCFFVRLEESFLVPEEKQYKPASIFPTLEEEKEYYQKYPTIYHLRQKLVDSTEKGDLRLVYLALAHLLKYRGHFLFEGDLDTENTSIEESFRVFLEQYGKQSDQPLIVHQPVLTILTDKLSKTKKVEEILKYYPTEKINSFFAQCLKLIVGNQANFKRIFDLEAEVKLQFSKETYEEDLESLLEKIGDEYLDIFLQAKKVHDAILLSEIISSTVKHTQAKLSSGMVERYERHKADLAKFKQFVKENVPQKATVFFKDTTKNGYAGYIKGKTTQEEFYKFVKKELSGVVGSEPFLEKIDQETFLLKQRTYTNGVIPHQVHLIELKAIIDQQKQHYPFLEEAGPKIIALFKFRIPYYVGPLAKEQEASSFAWIERKTAEKINPWNFSEVVDIEKSAMRFIQRMTKQDTYLPTEKVLPKNSLFYQKYMIFNELTKVSYKDERGVKQYFSGDEKQQIFKQLFQKERGKITVKKLQNFLYTHYHIENAQIFGIEKAFNASYSTYHDFMKLAKTNQKAMQEWLEQPEMEPIFEDIVKILTIFEDRQMIKHQLSKYQEVFGEKLLKEFARKHYTGWGRFSAKLIHGIRDRKTNKTILDYLINDDDVPANRNRNLMQLINDEHLSFKEEIAKATVFSKHKSLVDVIQDLPGSPAIKKGIWQSLKIVEELIAIIGYKPKNIVIEMARENQKTHRTKPRLKALENGLKQIGSTLLKEQPTDNKALQKERLYLYYLQNGRDMYTGEPLEIENLHQYEVDHIIPRSFIVDNSIDNKVLVASKQNQKKRDDVPKKQIVNEQRIFWNQLKEAKLISPKKYAYLTKIELTPEDKARFIQRQLVETRQITKHVANILHQSFNQEEEGTDCDGVQIITLKATLTSQFRQTFGLYKVREINPHHHAHDAYLNGFIANVLLKRYPKLAPEFVYGKYVKYSLARENKATAKKEFYSNILKFLESDEPFCDENGEIYWEKSHHLPRIKKVLSSHQVNVVKKVEQQKGGFYKETVNSKEKPDKLIERKNNWDVTKYGGFGSPVIAYAIAFVYAKGKTQKKTKAIEGITIMEQAAFEKDPTTFLKDKGFPQVTEFIKLPKYTLFEFDNGRRRFLASHKESQKGNPFILSDQLVTLLYHAQHYDKITYQESFDYVNTHLSDFSAILTEVLAFAEKYTLADKNIERIQELYEENKYGEISMIAQSFLQLLQFNAIGAPADFKFFGVTIPRKRYTSLTEIWDATIIYQSVTGLYETRIRMGDLWAGEQ

SEQ ID NO: 221 - protein, 1336 aa, Enterococcus hirae
MTKDYTIGLDIGTNSVGWAVLTDDYQLMKRKMSVHGNTEKKKIKKNFWGARLFDEGQTAEFRRTKRTNRRRLARRKYRLSKLQDLFAEELCKQDDCFFVRLEESFLVPEEKQYKPASIFPTLEEEKEYYQKYPTIYHLRQKLVDSTEKEDLRLVYLALAHLLKYRGHFLFEGDLDTENTSIEESFRVFLEQYSKQSDQPLIVHQPVLTILTDKLSKTKKVEEILKYYPTEKINSFFAQCLKLIVGNQANFKRIFDLEAEVKLQFSKETYEEDLESLLEKIGDEYLDIFLQAKKVHDAILLSEIISSTVKHTKAKLSSGMVERYERHKADLAKFKQFVKENVPQKATVFFKDTTKNGYAGYIKGKTTQEEFYKFVKKELSGVVGSEPFLEKIDQETFLLKQRTYTNGVIPHQVHLIELKAIIDQQKQHYPFLEEAGPKIIALFKFRIPYYVGPLAKEQEASSFAWIERKTAEKINPWNFSEVVDIEKSAMRFIQRMTKQDTYLPTEKVLPKNSLLYQKYMIFNELTKVSYKDERGVKQYFSGDEKQQIFKQLFQKERGKITVKKLQNFLYTHYHIENAQIFGIEKAFNASYSTYHDFMKLAKTNQKAMQEWLEQPEMEPIFEDIVKILTIFEDRQMIKHQLSKYQEVFGEKLLKEFARKHYTGWGRFSAKLIHGIRDRKTNKTILDYLINDDDVPANRNRNLMQLINDEHLSFKEEIAKATVFSKHKSLVDVIQDLPGSPAIKKGIWQSLKIVEELIAIIGYKPKNIVIEMARENQKTHRTSPRLKALENGLKQIGSTLLKEQPTDNKALQKERLYLYYLQNGRDMYTGEPLEIENLHQYEVDHIIPRSFIVDNSIDNKVLVASKQNQKKRDDVPKKQIVNEQRIFWNQLKEAKLISPKKYAYLTKIELTPEDKARFIQRQLVETRQITKHVANILHQSFNQEEEGTDCDGVQIITLKATLTSQFRQTFGLYKVREINPHHHAHDAYLNGFIANVLLKRYPKLAPEFVYGKYVKYSLARENKATAKKEFYSNILKFLESDEPFCDENGEIYWEKSHHLPRIKKVLSSHQVNVVKKVEQQKGGFYKETVNSKEKPDKLIERKNNWDVTKYGGFGSPVIAYAIAFVYAKGKTQKKTRAIEGITIMEQAAFEKDPTTFLKEKGFPQVTEFIKLPKYTLFEFDNGRRRFLASHKESQKGNPFILSDQLVTLLYHAQHYDKITYQESFDYVNTHLSDFSAILTEVLAFAEKYTLADKNIERIQELYEENKYGETSMIAQSFLQLLQFNAIGAPADFKFFGVTIPRKRYTSLTEIWDATIIYQSVTGLYETRIRMGDLWAGEQ

SEQ ID NO: 222 - protein, 1336 aa, Enterococcus hirae
MTKDYTIGLDIGTNSVGWAVLTDDYQLMKRKMSVHGNTEKKKIKKNFWGARLFDEGQTAEFRRTKRTNRRRLARRKYRLSKLQDLFAEELCKQDDCFFVRLEESFLVPEEKQYKPASIFPTLEEEKEYYQKYPTIYHLRQKLVDSTEKEDLRLVYLALAHLLKYRGHFLFEGDLDTENTSIEESFRVFLEQYGKQSDQPLIVHQPVLTILTDKLSKTKKVEEILKYYPTEKINSFFAQCLKLIVGNQANFKRIFDLEAEVKLQFSKETYEEDLESLLEKIGDEYLDIFLQAKKVHDAILLSEIISSTVKHTQAKLSSGMVERYERHKADLAKFKQFVKENVPQKATVFFKDTTKNGYAGYIKGKTTQEEFYKFVKKELSGVVGSEPFLEKIDQETFLLKQRTYTNGVIPHQVHLIELKAIIDQQKQHYPFLEEAGPKIIALFKFRIPYYVGPLAKEQEASSFAWIERKTAEKINPWNFSEVVDIEKSAMRFIQRMTKQDTYLPTEKVLPKNSLLYQKYMIFNELTKVSYKDERGVKQYFSGDEKQQIFKQLFQKERGKITVKKLQNFLYTHYHIENAQIFGIEKAFNASYSTYHDFMKLAKTNQKAMQEWLEQPEMEPIFEDIVKILTIFEDRQMIKHQLSKYQEVFGEKLLKEFARKHYTGWGRFSAKLIHGIRDRKTNKTILDYLINDDDVPANRNRNLMQLINDEHLSFKEEIAKATVFSKHKSLVDVIQDLPGSPAIKKGIWQSLKIVEELIAIIGYKPKNIVIEMARENQKTHRTKPRLKALENGLKQIGSTLLKEQPTDNKALQKERLYLYYLQNGRDMYTGEPLEIENLHQYEVDHIIPRSFIVDNSIDNKVLVASKQNQKKRDDVPNKQIVNEQRIFWNQLKEAKLISPKKYAYLTKIELTPEDKARFIQRQLVETRQITKHVANILHQSFNQEEEGTDCDGVQIITLKATLTSQFRQTFGLYKVREINPHHHAHDAYLNGFIANVLLKRYPKLAPEFVYGKYVKYSLARENKATAKKEFYSNILKFLESDEPFCDENGEIYWEKSHHLPRIKKVLSSHQVNVVKKVEQQKGGFYKETVNSKEKPDKLIERKNNWDVTKYGGFGSPVIAYAIAFVYAKGKTQKKTRAIEGITIMEQAAFEKDPTTFLKDKGFPHVTEFIKLPKYTLFEFDNGRRRFLASHKESQKGNPFILSDQLVTLLYHAQHYDKITYQESFDYVNTHLSDFSAILTEVLAFAEKYTLADKNIERIQELYEENKYGEISMIAQSFLQLLQFNAIGAPADFKFFGVTIPRKRYTSLTEIWDATIIYQSVTGLYETRIRMGDLWAGEQ

SEQ ID NO: 223 - protein, 1330 aa, Enterococcus italicus
MKNDYTIGLDIGTNSVGYSVVTDDYKVISKKMNVFGNTEKKSIKKNFWGVRLFESGQTAQEARMKRTSRRRIARRKNRICYLQEIFQPEMNHLDNNFFYRLNESFLVADDAKYDKHPIFGTLDEEIHFHEQFPTIYHLRKYLADGDEKADLRLVYLAIAHIIKFRGNFLIEGELNTENNSVIELSKVFVQLYNQTLSELEGFQFIDESIDFSEVLTQQLSKSERADNVLKLFPDEKGTGIFAQFIKLIVGNQGNFKKVFQLEEDQKLQLSTDDYEENIENLLAIIGDEYGDIFVAAQNLYQAILLAGILTSTEKTRAKLSASMIQRYEEHAKDLKLLKRFVKEHIPDKYAEIFNDATKNGYAGYIDGKTKEEEFYKYLKTTLVQKSGYQYFIEKIEQENFLRKQRIYDNGVIPHQVHAEELRAILRKQEKYYSFLKENHEKIEQIFKVRIPYYVGPLAKHNEQSRFAWNIRKSDEPIRPWNMNDVVDENASAVAFIERMTIKDIYLNENVLPRHSLIYEKFTVFNELTKVLYADDRGVFQRFSAEEKEDIFEKLFKSERKVTKKKLENYLRIELSISSPSVKGIEEQFNANFGTYLDLKKFDELHPYLDDEKYQDTLEEVIKVLTVFEDRSMIQNQLEQLPLNLSTKTIKALSRRKYTGWGRLSARLIDGIHDKNSGKTILDYLIEDESDSYIVNRNFMQLINDDHLSFKKIIEDSQPYKEQQSAEEIVSELSGSPAIKKGILQSLKIVDELVAIMGYKPKNIVVEMARENQTTGRGKQNSKPRLKGIENGLKEFSDSVLKGSSIDNKQLQNDRLYLYYLQNGKDMYTGHELDIDHLSTYDIDHIIPQSFLTDNSIDNRVLTTSKSNRGKSDNVPSEEVVRKMDRFWRKLLNAKLISERKYTNLTKKELTESDKAGFLKRQLVETRQITKHVATILDSKFNEDSNNRDVQIITLKSALVSEFRKTFNLYKVREINDLHHAHDAYLNAVVALSLLRVYPQLKPEFVYGEYGKNSIHDQNKATIKKQFYSNITRYFASKDYIINDDGEILWNKQETIAQVIKTLGMHQVNVVKKVEIQKGGFSKESIQPKGESQKLIRRKQQWNTKKYGGFDSPVVAYAILLSFDKGKRKARSFKIVGITIQDRESFEGNPILYLSKKDYHNPKVEAILPKYSLFEFENGRRRMVASASETQKGNQLIIPGHLMELLYHSKKIINGKNSDSVSYIQNNKEKFREIFEYIVDFSSKYISADANLNKIEKIFENNFHKASEQEIAKSFINLLTFTAMGAPADFEFFGEKIPRKRYVSISEIIDAVFIHQSITGLYETRVRLTEV

SEQ ID NO: 224 - protein, 1330 aa, Enterococcus mundtii
MEKEYTIGLDIGTNSVGWAVLTDDYRLVARKMSIQGDSNRKKIKKNFWGARLFEEGKTAQFRRIKRTNRRRIARRRQRVLALQDIFAEEIHKKDPNFFARLEEGDRVEADKRFAKFPVFATLSEEKNYHRQYPTIYHLRHDLANSKEQADIRLVYLAIAHCLKYRGHFLFEGELDTENTSVTENYQQFLQAYQQFFPEPIGDLDDAVPILTERLSKAKRVEKVLAYYPSEKSTGNFAQFLKLMVGNQANFKKTFDLEEEMKLNFTRDCYEEDLNELLEKTSDDYAELFLKAKGVYDAILLSQILSKSDDETKAKLSANMKLRFEEHQRDLKQLKELVRRDLPKKYDDFFKNRSKNGYAGYVKGKATQEDFYKFLRTELAGLEESQSIMEKIDLEIYLLKQRTFANGVIPHQIHLVEMREIMDRQKRFYPFLKGAQGKIEKLLTFRIPYYVGPLAQEGQSPFAWIKRKSPSQITPWNFAEVVDKENSAIEFIERMTNQDTYLPKEKVLPKQSLIYQRFMIFNELTKVSYTDERGKSHYFSSEQKRKIFNELFKQHPRVTEKQLRKFLELNEQIDSTEIKGIETSFNASYSTYHDLLKLSDQMDTLLDDPDMTTMFEEIIKILTIFEDREMIREQLKPYETVLGLPAIKKLAKKHYTGWGRLSEKMIQGMREKQSRKTILDYLIDDDDFPCNRNRNFMQLINDDHLSFKETIANELIMSDSNVLLDQVKAIPGSPAVKKGIWQSIKIVEEIIGIIGKAPKNIVIEMARENQRTSRSRPRLKALEEALKNIDSPLLKDYPTDNQALQKDRLYLYYLQNGKDMYTGEPLEIHRLSEYDIDHIIPRSFIVDNSLDNKVLVSSKVNRGKLDNAPDPLVVKRMRSHWEKLHQAKLISDKKLANLTKQNLTEADKARFIQRQLVETRQITKHVANLLHQHFNLPEEVSATEKTSIITLKSTLTSQFRQMFDIYKVREINHHHHAHDAYLNGVVAMTLLKKYPKLAPEFVYGSYIKGDINQINKATAKKEFYSNIMKFFESEEIICDEQGEVIWNKKRDLSTIKKTIGAHQVNIVKKVEKQKGGFYKETINSKANPEKLIPRKASLDPLKYGGYGSPLVAYTVIFIFEKGKQKKVTKGIEGITVMEQLRFEQDPREFLKTKGYEGVKQWLILPKYILFEAQGGYRRMIASHQETQKANSLILPENLVTLLYHARHYDEINHKVSFDYVNAHKEGFNDIFDFISDFGVRYILAPQHLEKIKVAYEKNKEVDLKEMIDAILSLLKFTLFGASVEFKFFDIKILKRYKSLTDIWEATIIYQSVTGLYERRVEVRKLWDGERL

SEQ ID NO: 225 - protein, 1334 aa, Enterococcus phoeniculicola
MKKEYTIGLDIGTNSVGWAVLTENYDLVKKKMKVYGNTETKYLKKNLWGVRLFDEGETAADRRLKRTTRRRYSRRRNRICRLQDLFTEEMNQVDANFFHRLQESFLVPDEKEFERHAIFGKMEEEVSYYREFPTIYHLRKHLADTSEQADLRLVYLALAHIVKYRGHFLIEGELNTENSSVSETFRTFIQVYNQIFRENEVPLAVPDNIEELFSEKVSRARKVEAILSVYSEEKSTGTLAQFLKLMVGNQGRFKKTFDLEEDGIIQIPKEEYEEELETLLAIIGDEYAEIFSATKSVYDAVALSGILSVTDGDTKAKLSASMVERYEAHQKDLVQFKQFIRKELPEMYAPIFRDNSVSGYAGYVENSKVVTQAEFYKYIKKAIEKVPGAEYFLEKIEQETFLDKQRTFNNGVIPHQIHLEELEAIIQKQATYYPFLADNKEEMKQLVTFRIPYYVGPLADGNSPFAWLERISSEPIRPGNLAEVVDIKKSATKFIERMTNFDTYLPTEKVLPKHSMIYEKYMVYNELTKVSYVDERGMNQRFSGEEKKQIVEELFKQSRKVTKKLLEKFLSNEFGLVDVAIKGIETSFNAGYGTYHDFLKIGITREQLDKEENSETLEEIVKILTVFEDRKMIREQLKKYTYLFDEEVLKKLERRHYTGWGRLSAKLLIGIKEKRTHKTILDYLIEDDGGKQPINRNLMQLINDSDLSFKSEIAEAQSDMNTEDLHEVVQNLAGSPAIKKGILQSLKIVDELVDIMGSLPKNIVVEMARENQTTSRGRTNSNPRMKALEEAMRNLRSNLLKEYPTDNQALQNDRLYLYYLQNGKDMYTGLDLSLHNLSSYDIDHIVPQSFTTDNSLDNRVLVSSKENRGKKDDVPSKEVVQKNITLWETLKNSNLISQKKYDNLTKGLRGGLTEDDRAHFIKRQLVETRQITKHVARILDQRFNSQKDEEGKTIRAVRVVTLKSSLTSQFRKQFAIHKVREINDYHHGHDAYLNGVVANSLLRVYPQLQPEFVYGDYPKFNAYKANKATAKKQLYTNIMKFFAEDAVIIDENGEILWDKKNIATVKKVMSYPQMNIVKKPEIQTGSFSKETIKPKGDSDKLISRKTNWSPKLYGGFDSPQVAYSVIITYEKGKKKVRAKAIVGITIMEQSLFKKDPVSLLEEKGYANPEVLIHLPKYTLYELENGRRRLLASANEAQKGNQLVLPASLVTLLYHAKQVDEDSGKSEEYVREHRAEFAEILNYVQAFSETKILANKNLQTILKLYEENKEADIKEIAESFVNLMKFSAYGAPMDFKFFGKTIPRSRYTSVGELLSATIINQSITGLYETRRKLVD

SEQ ID NO: 226 - protein, 1330 aa, Enterococcus massiliensis
MGKEYTIGLDIGTNSVGWAVLQEDLDLVRRKMKVYGNTEKNYLKKNFWGVDLFDEGMTAKDTRLKRTTRRRYFRRRQRISYLQTFFQEEMNRIDPNFFNRLDESFLIEEDKLSERHPIFGTIEEEVAYHKNYATIYHLRKELADAEEKADLRLVYLALAHIIKYRGHFLIEGRLSTENTSTEETFKTFLQKYNQTFNPVDETISIGSIFADKVSRAKKAEGVLALFPDEKRNGTFDQFLKMIVGNQGNFKKTFELEEDAKLQFSKEEYDESLEALLGEIGDEYADVFEAAKNVYNAVELSGILTVTDNSTKAKLSASMIKRYEDHKTDLKLFKEFIRKNLPEKYHEIFNDKNTDGYAGYIDNSKKTSQEKFYKYITNLIEKIDGAEYFLKKIENEDFLRKQRTFDNGIIPHQIHLEELKAILHHQAMYYPFLQEKFSNFVDLLTFRIPYYVGPLANGNSRFSWLSRKSDEPIRPWNLAEVVDLSKSAELFIERMTNFDLYLPSEKVLPKHSMLYEKYTVYNELTKVTYKDEQGKVQNFSSEEKERIFIDLFKQHRKVTKKDLSNFLRNEYNLDDVIIDGIENKFNASFNTYHDFLKLKIDPKVLDDPANEPMFEEIVKILTIFEDRKMLREQLSKFSDRLSEKTIKDLERRHYTGWGRLSAKLINGIHDKQSNKTILDYLINDDAPKKNINRNFMQLINDNRLTFKEEIEKEQLKANSEESLIEIVQNLAGSPAIKKGIFQSLKIVDELVEIMGYAPTNIVVEMARENQTTANGRRNSRPRLKNLEKAIDDLDSEILKKHPVDNKALQKDRLYLYYLQNGKDMYTNEELDIHKLSTYDIDHIIPQSFIVDNSLDNRVLVSSSKNRGKLDDVPSKEVVKKMRAFWESLYRSGLISKKKFDNLVKAESGGLSEDDKAGFIHRQLVETRQITKNVARILHQRFNSEKDEEGNLIRKVRIITLKSALTSQFRKNYGIYKIREINDYHHAHDAYLNGVVATALLKIYPQLEPEFVYGEFHRFNAFKENKATAKKQFYSNLMEFSKSDKVIIDENGEILWNQKKIVTVKKVMNYRQMNIVKKVEIQKGGFSKESILPKGDSDKLISRKKEWDTTKYGGFDSPNVAYSVVIRYEKGKTRKLVKTIVGITIMERAAFEKNEREFLKNKGYQNPQICMKLPKYSLYEFDDGRRRLLASAKEAQKGNQMVLPAHLVTFLYHAKHCNEKPDSLKYVTEHQSGFSEIMAHVKDFAEKYTLVDKNLEKILSLYAKNMDSEVKEIAQSFVDLMQLNAFGAPADFKFFGETIPRKRYTSVNELLEATIINQSITGLYETRRRLGD

SEQ ID NO: 227 - protein, 1339 aa, Enterococcus villorum
MNKAYTLGLDIGTNSVGWAVVTDDYRLMAKKMPVHSKMEKKKIKKNFWGARLFDEGQTAEERRNKRATRRRLRRRKYRILELQKIFSEEILKKDSHFFARLDESFLIPEDKQYARFPIFPTLLEEKAYYQNYPTIYHLRQKLADSTEKADIRLVYLALAHMIKYRGHFLFEGELDTENTSVEETFKEFIDIYNEQFEEGIIFYKDIPLILTDKLSKSKKVEKILQYYPKEKTTGCLAQFLKLIVGNQGNFKQAFHLDEEVKIQISKETYEEDLEKLLRKSNEEMIDVFLQVKKVYDAILLSDILSTKMKDTKAKLSAGMIERYQNHKKDLEELKQFVRAHLHEKVTVFFKDSSKDGYAGYIDGKTTQADFYKFLKKELTGVPGSEPMLAKIDQENFLLKQRTPTNGVIPHQVHLTEFKAIIDQQKQYYPFLEKSKEKMIQLLTFRIPYYVGPLAQDKETSSFAWLERKTTEKIKPWNAKDVIDYGASATKFIQRMINYDTYLPTEKVLPKYSMLYQKYTIFNELTKVAYKDDRGIKHQFSSEEKLRIFQELFKKQRRVTKKKLQHFLSANYNIEDAEILGVDKVFNSSYATYHDFLELAKPYTEKIIELLEQPEMEEMFEDIVKIITIFEDREMVRTQLKKYQRILGEEIFKKLVKKKYTGWGRLSKRLINGIRDQKTNKTILDYLINDDDFPYNRNRNFMQLINDDHLSFKEEIAKELTLSDKQSLLEVVEAIPGSPAIKKGIWQTLKIVEELIAIIGYKPKNIVIEMARENQTTTGGKNRSKPRLKSLEEALKNFDSQLLKERPVDNQSLQKDRLYLYYLQNGKDMYTGESLDIDRLSEYDIDHIIPRSFIVDHSLDNKVLVSSKENRLKKDDVPDSKVVKRMKAYWEKLLRANLISERKFSYLTKLELTDDDKARFIQRQLVETRQITKHVAAILHQYFNQTQELEKEKDIRIITLKSSLVSQFRQVFGIHKVREINHHHHAHDAYLNAVVALALLKKYPRLAPEFVYGSFAKFHLVKENKATAKKEFYSNILKFFEKEEQFCDENGEIFWDKRKHIQQIKKVISSHQVNIVKKVEVQTGSFYKETVNTKEKPDKLIKRKNNWDVTKYGGFGSPVVAYAVVFTYEKGKNHKKAKAIEGITIMEQALFEKDPISFLIEKGYSNVNQFIKLPKYTLFELANGQRRMLASHQELQKANSFILPEKLVTLLYHANHYDEIAYKDSYDYVNEHFSNFQDILDKVIIFAEKYTSAPQKLNQIIATYEKNQEADRKIMAHSFVNLMQFNALGAPADFKFFDTTITRKRYTSLTEIWQSTIIYQSVTGLYETRRRMADLWDGVQ

SEQ ID NO: 228 - protein, 1424 aa, synthetic construct
MDYKDHDGDYKDHDIDYKDDDDKMAPKKKRKVGIHGVPAADKKYSIGLDIGTNSVGWAVITDEYKVPSKKFKVLGNTDRHSIKKNLIGALLFDSGETAEATRLKRTARRRYTRRKNRICYLQEIFSNEMAKVDDSFFHRLEESFLVEEDKKHERHPIFGNIVDEVAYHEKYPTIYHLRKKLVDSTDKADLRLIYLALAHMIKFRGHFLIEGDLNPDNSDVDKLFIQLVQTYNQLFEENPINASGVDAKAILSARLSKSRRLENLIAQLPGEKKNGLFGNLIALSLGLTPNFKSNFDLAEDAKLQLSKDTYDDDLDNLLAQIGDQYADLFLAAKNLSDAILLSDILRVNTEITKAPLSASMIKRYDEHHQDLTLLKALVRQQLPEKYKEIFFDQSKNGYAGYIDGGASQEEFYKFIKPILEKMDGTEELLVKLNREDLLRKQRTFDNGSIPHQIHLGELHAILRRQEDFYPFLKDNREKIEKILTFRIPYYVGPLARGNSRFAWMTRKSEETITPWNFEEVVDKGASAQSFIERMTNFDKNLPNEKVLPKHSLLYEYFTVYNELTKVKYVTEGMRKPAFLSGEQKKAIVDLLFKTNRKVTVKQLKEDYFKKIECFDSVEISGVEDRFNASLGTYHDLLKIIKDKDFLDNEENEDILEDIVLTLTLFEDREMIEERLKTYAHLFDDKVMKQLKRRRYTGWGRLSRKLINGIRDKQSGKTILDFLKSDGFANRNFMQLIHDDSLTFKEDIQKAQVSGQGDSLHEHIANLAGSPAIKKGILQTVKVVDELVKVMGRHKPENIVIEMARENQTTQKGQKNSRERMKRIEEGIKELGSQILKEHPVENTQLQNEKLYLYYLQNGRDMYVDQELDINRLSDYDVDHIVPQSFLKDDSIDNKVLTRSDKNRGKSDNVPSEEVVKKMKNYWRQLLNAKLITQRKFDNLTKAERGGLSELDKAGFIKRQLVETRQITKHVAQILDSRMNTKYDENDKLIREVKVITLKSKLVSDFRKDFQFYKVREINNYHHAHDAYLNAVVGTALIKKYPKLESEFVYGDYKVYDVRKMIAKSEQEIGKATAKYFFYSNIMNFFKTEITLANGEIRKRPLIETNGETGEIVWDKGRDFATVRKVLSMPQVNIVKKTEVQTGGFSKESILPKRNSDKLIARKKDWDPKKYGGFDSPTVAYSVLVVAKVEKGKSKKLKSVKELLGITIMERSSFEKNPIDFLEAKGYKEVKKDLIIKLPKYSLFELENGRKRMLASAGELQKGNELALPSKYVNFLYLASHYEKLKGSPEDNEQKQLFVEQHKHYLDEIIEQISEFSKRVILADANLDKVLSAYNKHRDKPIREQAENIIHLFTLTNLGAPAAFKYFDTTIDRKRYTSTKEVLDATLIHQSITGLYETRIDLSQLGGDKRPAATKKAGQAKKKKK

SEQ ID NO: 229 - protein, 1343 aa, Kandleria vitulina
MSQNNNKIYNIGLDIGDASVGWAVVDEHYNLLKRHGKHMWGSRLFTQANTAVERRSSRSTRRRYNKRRERIRLLRGIMEDMVLDVDPTFFIRLANVSFLDQEDKKDYLKENYHSNYNLFIDKDFNDKTYYDKYPTIYHLRKHLCESKEKEDPRLIYLALHHIVKYRGNFLYEGQKFSMDVSNIEDKMIDVLRQFNEINLFEYVEDRKKIDEVLNVLKEPLSKKHKADKAFALFDTTKDNKAAYKELCAALAGNKFNVTKMLKEAELHDEDEKDISFKFSDATFDDAFVEKQPLLGDCVEFIDLLHDIYSWVELQNILGSAHTSEPSISAAMIQRYEDHKNDLKLLKDVIRKYLPKKYFEVFRDEKSKKNNYCNYINHPSKTPVDEFYKYIKKLIEKIDDPDVKTILNKIELESFMLKQNSRTNGAVPYQMQLDELNKILENQSVYYSDLKDNEDKIRSILTFRIPYYFGPLNITKDRQFDWIIKKEGKENERILPWNANEIVDVDKTADEFIKRMRNFCTYFPDEPVLAKNSLTVSKYEVLNEINKLRINDHLIKRDIKDKMLHTLFMDHKSISANAMKKWLVKNQYFSNTDDIKIEGFQKENACSTSLTPWIDFTKIFGEINNSNYELIEKIIYDVTVFEDKKILRRRLKKEYDLDEEKIKKILKLKYSGWSRLSKKLLSGIKTKYKDSTRTPETVLEVMERTNMNLMQVINDEKLGFKKTIDDANSTSVSGKFSYAEVQELAGSPAIKRGIWQALLIVDEIKKIMKHEPAHVYIEFARNEDEKERKDSFVNQMLKLYKDYDFEDETEKEANKHLKGEDAKSKIRSERLKLYYTQMGKCMYTGKSLDIDRLDTYQVDHIVPQSLLKDDSIDNKVLVLSSENQRKLDDLVIPEMIRNKMFGFWNKLYENKIISPKKFYSLIKSEYSDKDKERFINRQIVETRQITKHVAQIISNHYETTKVVTVRADLSHAFRERYHIYKNRDINDFHHAHDAYIATILGTYIGHRFESLDAKYIYGEYQKIFRNNKNKDKEFNKNKDGFILNSMRNLYADKDTGEVVWDPEWISRIKKCFYYKDCFVTKKLEENNGSFFNLTVRPNDEHSEKGTTIAKVPVNKLRSNVHKYGGFEGLKYSIVAIKGKKKKGKKIIDVNKLVGIPLMYKNVDDETKINYIKESEGLEEVKIIKEILKNQLIEINGGLFYVTSPTEIVNARQLILDFNCTRIIDGIYKAMKYKNYSELSQEEIMNVYDIFVEKLKLYYPTYKNIATNFENMREQFENISDEEKCEVIRQMLVVMHAGPQNGNITFDDFKLSNRLGRLNCKTISLDTTVFIADSPTGMYSKKYKL

SEQ ID NO: 230 - protein, 1344 aa, Kandleria vitulina
MSQNNNKIYNIGLDIGDASVGWAVVDEHYNLLKRHGKHMWGSRLFTQANTAVERRSSRSTRRRYNKRRERIRLLREIMEDMVLDVDPTFFIRLANVSFLDQEDKKDYLKENYHSNYNLFIDKDFNDKTYYDKYPTIYHLRKHLCESKEKEDPRLIYLALHHIVKYRGNFLYEGQKFSMDVSNIEDKMIDVLRQFNEINLFEYVEDRKKIDEVLNVLKEPLSKKHKAEKAFALFDTTKDNKAAYKELCAALAGNKFNVTKMLKEAELHDEDEKDISFKFSDATFDDAFVEKQPLLGDCVEFIDLLHDIYSWVELQNILGSAHTSEPSISAAMIQRYEDHKNDLKLLKDVIRKYLPKKYFEVFRDEKSKKNNYCNYINHPSKTPVDEFYKYIKKLIEKIDDPDVKTILNKIELESFMLKQNSRTNGAVPYQMQLDELNKILENQSVYYSDLKDNEDKIRSILTFRIPYYFGPLNITKDRQFDWIIKKEGKENERILPWNANEIVDVDKTADEFIKRMRNFCTYFPDEPVMAKNSLTVSKYEVLNEINKLRINDHLIKRDMKDKMLHTLFMDHKSISANAMKKWLVKNQYFSNTDDIKIEGFQKENACSTSLTPWIDFTKIFGKINESNYDFIEKIIYDVTVFEDKKILRRRLKKEYDLDEEKIKKILKLKYSGWSRLSKKLLSGIKTKYKDSTRTPETVLEVMERTNMNLMQVINDEKLGFKKTIDDANSTSVSGKFSYAEVQELAGSPAIKRGIWQALLIVDEIKKIMKHEPAHVYIEFARNEDEKERKDSFVNQMLKLYKDYDFEDETEKEANKHLKGEDAKSKIRSERLKLYYTQMGKCMYTGKSLDIDRLDTYQVDHIVPQSLLKDDSIDNKVLVLSSENQRKLDDLVIPSSIRNKMYGFWEKLFNNKIISPKKFYSLIKTEFNEKDQERFINRQIVETRQITKHVAQIIDNHYENTKVVTVRADLSHQFRERYHIYKNRDINDFHHAHDAYIATILGTYIGHRFESLDAKYIYGEYKRIFRNQKNKGKEMKKNNDGFILNSMRNIYADKDTGEIVWDPNYIDRIKKCFYYKDCFVTKKLEENNGTFFNVTVLPNDTNSDKDNTLATVPVNKYRSNVNKYGGFSGVNSFIVAIKGKKKKGKKVIEVNKLTGIPLMYKNADEEIKINYLKQAEDLEEVQIGKEILKNQLIEKDGGLYYIVAPTEIINAKQLILNESQTKLVCEIYKAMKYKNYDNLDSEKIIDLYRLLINKMELYYPEYRKQLVKKFEDRYEQLKVISIEEKCNIIKQILATLHCNSSIGKIMYSDFKISTTIGRLNGRTISLDDISFIAESPTGMYSKKYKL

SEQ ID NO: 231 - protein, 1314 aa, Lactobacillus animalis
MLKKDYSIGLDIGTNSVGHAVVTDDYKVPTKKMKVFGDTSKKTIKKNMLGVLLFNEGQTAADTRLKRGARRRYTRRKNRLRYLQEIFAPALAKVDPNFFYRLEESSLVAEDKKYDVYPIFGKREEELLYHDTHKTIYHLRSELANNDRPADLRLVYLALAHIIKYRGNFLLEGEIDLRTTDINKVFAEFSETLNENSDENLGKLDVADIFKDNTFSKTKKSEELLKLSGAKKNQLAHQLFKMMVGNMGSFKKVLGTDEEHKLSFGKDTYEDDLNDLLAEAGDQYLDIFVAAKKVYDAAILASILDVKDTQTKTVFSQAMIERYEEHQKDLIELKRVFKKYLPEKCHDFFSEPKISGYAGYIDGKVSEEDFYKYTKKTLKGIPETEEILQKIDANNYLRKQRTFDNGAIPHQVHLKELVAIVENQGKYYPFLRENKDKFEKILNFRIPYYVGPLARGNSKFAWLTRAGEGKITPYNFDEMIDKETSAEDFIKRMTINDLYLPTEPVLPKHSLLYERYTIFNELAGVRYVTENGEAKYFDAQTKRSIFELFKLDRKVSEKMVIKHLKVVMPAIRIQALKGLDNGKFNASYGTYKDLVDMGVAPELLNDEVNSEKWEDIIKTLTIFEGRKLIKRRLENYRDFLGEDILRKLSRKKYTGWGRLSAKLLDGIYDKKTHKTILDCLMTEDYSQNFMQLINDDTYSFKETIKNAQVIEKEETLAKTVQELPGSPAIKKGILQSLEIVDEIIKVMGYKPKSIVVEMARETQKTHGTRKREDRVQQIVKNLKDANELPKKLPSNAELSDERKYLYCLQNGRDMYTGAPLDYDHLQFYDVDHIIPQSFLKDDSIENKVLTIKKENVRKTNGLPSEAVIQKMGSFWKKLLDAGAMTNKKYDNLRRNLHGGLNEKLKERFIERQLVETRQITKYVAQLLDQRLNYDGNGVELDEKIAIVTLKAQLASQFRSEFKLRKVRALNNLHHAHDAYLNAVVANLIMAKYPELEPEFVYGKYRKTKFKGLGKATAKNTLYANVLYFLKENEVYPFWDKARDLPTIKRYLYRAQVNKVRKAERQTGGFSDEMLVPKSDSGKLLPRKEGLDPVKYGGYAKAVESYAVLITADEVKKGKTKKVKTLVNIPIIDSKKYEADPTAYLASRGYTNVTNSFILPKYSLLEDPEGRRRYLASFKEFQKANELILPQHLVELLYWVNAKDGEQKLEDHKAEFKELFDKIMEFADKYVVAPKNSEKIRRLYEENQDATPMELGKNFVELLRYTADGAASDFKFFGENIPRKRYNSAGSLLNGTLIYQSKTGLYETRIDLGKL

SEQ ID NO: 232 - protein, 1368 aa, Lactobacillus curvatus
MSRPYNIGLDIGTSSIGWSVVDDQSKLVSVRGKYGYGVRLYDEGQTAAERRSFRTTRRRLKRRKWRLGLLREIFEPYITPVDDTFFLRKKQSNLSPKDQRKLYPQTSLFNDRTDRAFYDDYPTIYHLRYKLMTEKRQFDIREIYLAMHHIVKYRGHFLNEAPVSSFKSSEINLVAHFDRLNTIFADLFSESGFQLETDKLAEVKALLLDNHQSASNRQRQALLLIYTPSTNKAVEKQNKAIATELLKAILGLKAKFNVLTGIEAEDVKTWTLTFNAENFDEEMVKLESSLDDNAHQIIESLQELYSGVLLAGIVPENQSLSQAMITKYDDHQKHLKMLKAVREALAPEDRQRLKQAYDQYVDGQENTKAYSKEDFYGDITKALKNNPDHPIVSEIKKLIELDQFMPKQRTKDNGAIPHQLHQQELDRIIENQQQYYPWLAELNPNSKRQTVAKYKLDELVAFRVPYYVGPLITAEQQQQSSDAKFAWMIRKAEGQITPWNFDDKVDRQASANEFIKRMTTTDTYLLAEDVLPKQSLIYQRFEVLNELNGLKIDDQPITTELKQAIFTDLFMQKTSVTVKNIQDYLVSEKRYASRPAITGLSDENKFNSRLSTYHDLKTIVGDAVDDVDKQADLEKCIEWSTIFEDGKIYSAKLNEIDWLTDQQRVQLAAKRYRGWGRLSAKLLTQIVNANGQRIMDLLWDTTDNFMRIVHSEDFDKLITEANQMMLAENDVQDVINDLYTSPQNKKALRQILLVVNDIQKAMKGQAPERILIEFAREDEVNPRLSVQRKRQVEQVYQNISNELLNNTEIRNELKDLSNSALSNTRLFLYFMQGGRDMYTGDSLNIDRLSTYDIDHILPQSFIKDNSLDNRVLVSQRMNRSKADQVPTDFTSVELGQKMQIQWEQMLRAGLITKKKYDNLTLNPDHISKYAMKGFINRQLVETRQVIKLATNLLMEQYGEDNIELITVKSGLTHQMRTEFDFPKNRNLNNHHHAFDAYLTAFVGLYLLKRYPKLKPYFVYGEYQKASQQDKWRNFNFLNGLKKDELVDENTEAVIWNKESGLAYLNKIYQFKKILVTREVHENSGALFNQTLYAAKDDKASGQGGKQLIPAKQDRPTALYGGYSGKTVAYMCIVRIKNKKGDLYKVCGVETSWLAQLKQLTDEDSKKAFLKQKISPQFTKVKKQKGTIVKVVEDFEVIAPHILINQRFFDNGQELTLGSATYKHNEQELILDKTAVKLLNGALPLTQSEELAEQVYDEILDQVMHYFPLYDTNQFRAKLSAGKAAFMKLPWKSQWDGNKMVQVGQQVILDRVLIGLHANAAVSDLGVLKISTPLGKMQQPSGISLSPDTQIIYQSPTGLFERRVALRDL

SEQ ID NO: 233 - protein, 1356 aa, Lactobacillus farciminis
MTKKEQPYNIGLDIGTGSVGWAVTNDNYDLLNIKKKNLWGVRLFEGAQTAKETRLNRSTRRRYRRRKNRINWLNEIFSEELANTDPSFLIRLQNSWVSKKDPDRKRDKYNLFIDNPYTDKEYYREFPTIFHLRKELIINKNKADIRLVYLALHNILKYRGNFTYEHQKFNISTLNSNLSKELIELNQQLIKYDISFPDNCDWNHISDILIGRGNATQKSSNILNNFTLDKETKKLLKEVINLILGNVAHLNTIFKTSLTKDEEKLSFSGKDIESKLDDLDSILDDDQFTVLDTANRIYSTITLNEILNGESYFSMAKVNQYENHAIDLCKLRDMWHTTKNEKAVGLSRQAYDDYINKPKYGTKELYTSLKKFLKVALPTNLAKEAEEKISKGTYLVKPRNSENGVVPYQLNKIEMEKIIDNQSQYYPFLKENKEKLLSILSFRIPYYVGPLQSSEKNPFAWMERKSNGHARPWNFDEIVDREKSSNKFIRRMTVTDSYLVGEPVLPKNSLIYQRYEVLNELNNIRITENLKTNPTGSRLTVETKQHIYNELFKNYKKITVKKLTKWLIAQGYYKNPILIGLSQKDEFNSTLTTYLDMKKIFGSSFMENNKNYNQIEELIEWLTIFEDKQILNEKLHSSNYSYTSDQIKKISNMRYKGWGRLSKKILTCITTETNTPKSLQLSNYSVLDLMWTTNNNFISIISNDKYDFKNYIENHNLNKNEDQNISNLVNDIHVSPALKRGITQSIKIVQEIVKFMGHAPKYIFIEVTRETKKSEITTSRGKRIQRLQSKLLNKANGFKPQLRKYLVPNEKIQEELKKHKNDLSSERIMLYFLQNGKSLYSEESLNINKLSDYQVDHILPRTYIPDDSLENKALVLAKENQRKADDLLLNSNVIDKNLERWTYMLNNNMMGLKKFKNLTRRVITDKDKLGFIHRQLVQTSQMVKGVANILNSMYKNQGTTCIQARANLSTAFRKALSDQDDRYHFKHPELVKNRNINDFHHAQDAYLASFLGTYRLRRFPTDEMLLMNGEYNKFYGQVKELYSKKKKLPDSRKNGFIISPLVNGTTQYDRNTGEIIWNVGFRDKILKIFNYHQCNVTRKTEIKTGQFYDQTIYSPKNPKYKKLIAQKKDMDPNIYGGFSGDNKSSITIVKIDNNKIKPVAIPIRLINDLKDKKTLQNWLEENVKHKKSIQIIKNNVPIGQIIYSKKVGLLSLNSDREIANRQQLILPPEHSALLRILQIPDEDPDQILAFYDKNILVEILQELITKMKKFYPFYKNEQEFLASNIENFNQATTSEKINSLEELITLLHANSTSAHLIFNNIEKKAFGRKTHGLTLNDTDFIYQSVTGLYETRIHIE

SEQ ID NO: 234 - protein, 1334 aa, Listeria innocua
MKKPYTIGLDIGTNSVGWAVLTDQYDLVKRKMKIAGDSEKKQIKKNFWGVRLFDEGQTAADRRMARTARRRIERRRNRISYLQGIFAEEMSKTDANFFCRLSDSFYVDNEKRNSRHPFFATIEEEVEYHKNYPTIYHLREELVNSSEKADLRLVYLALAHIIKYRGNFLIEGALDTQNTSVDGIYKQFIQTYNQVFASGIEDGSLKKLEDNKDVAKILVEKVTRKEKLERILKLYPGEKSAGMFAQFISLIVGSKGNFQKPFDLIEKSDIECAKDSYEEDLESLLALIGDEYAELFVAAKNAYSAVVLSSIITVAETETNAKLSASMIERFDTHEEDLGELKAFIKLHLPKHYEEIFSNTEKHGYAGYIDGKTKQADFYKYMKMTLENIEGADYFIAKIEKENFLRKQRTFDNGAIPHQLHLEELEAILHQQAKYYPFLKENYDKIKSLVTFRIPYFVGPLANGQSEFAWLTRKADGEIRPWNIEEKVDFGKSAVDFIEKMTNKDTYLPKENVLPKHSLCYQKYLVYNELTKVRYINDQGKTSYFSGQEKEQIFNDLFKQKRKVKKKDLELFLRNMSHVESPTIEGLEDSFNSSYSTYHDLLKVGIKQEILDNPVNTEMLENIVKILTVFEDKRMIKEQLQQFSDVLDGVVLKKLERRHYTGWGRLSAKLLMGIRDKQSHLTILDYLMNDDGLNRNLMQLINDSNLSFKSIIEKEQVTTADKDIQSIVADLAGSPAIKKGILQSLKIVDELVSVMGYPPQTIVVEMARENQTTGKGKNNSRPRYKSLEKAIKEFGSQILKEHPTDNQELRNNRLYLYYLQNGKDMYTGQDLDIHNLSNYDIDHIVPQSFITDNSIDNLVLTSSAGNREKGDDVPPLEIVRKRKVFWEKLYQGNLMSKRKFDYLTKAERGGLTEADKARFIHRQLVETRQITKNVANILHQRFNYEKDDHGNTMKQVRIVTLKSALVSQFRKQFQLYKVRDVNDYHHAHDAYLNGVVANTLLKVYPQLEPEFVYGDYHQFDWFKANKATAKKQFYTNIMLFFAQKDRIIDENGEILWDKKYLDTVKKVMSYRQMNIVKKTEIQKGEFSKATIKPKGNSSKLIPRKTNWDPMKYGGLDSPNMAYAVVIEYAKGKNKLVFEKKIIRVTIMERKAFEKDEKAFLEEQGYRQPKVLAKLPKYTLYECEEGRRRMLASANEAQKGNQQVLPNHLVTLLHHAANCEVSDGKSLDYIESNREMFAELLAHVSEFAKRYTLAEANLNKINQLFEQNKEGDIKAIAQSFVDLMAFNAMGAPASFKFFETTIERKRYNNLKELLNSTIIYQSITGLYESRKRLDD

SEQ ID NO: 235 - protein, 1334 aa, Listeria innocua
MKKPYTIGLDIGTNSVGWAVLTDQYDLVKRKMKIAGDSEKKQIKKNFWGVRLFDEGQTAADRRMARTARRRIERRRNRISYLQGIFAEEMSKTDANFFCRLSDSFYVDNEKRNSRHPFFATIEEEVEYHKNYPTIYHLREELVNSSEKADLRLVYLALAHIIKYRGNFLIEGALDTQNTSVDGIYKQFIQTYNQVFASGIEDGSLKKLEDNKDVAKILVEKVTRKEKLERILKLYPGEKSAGMFAQFISLIVGSKGNFQKPFDLIEKSDIECAKDSYEEDLESLLALIGDEYAELFVAAKNAYSAVVLSSIITVAETETNAKLSASMIERFDTHEEDLGELKAFIKLHLPKHYEEIFSNTEKHGYAGYIDGKTKQADFYKYMKMTLENIEGADYFIAKIEKENFLRKQRTFDNGAIPHQLHLEELEAILHQQAKYYPFLKENYDKIKSLVTFRIPYFVGPLANGQSEFAWLTRKADGEIRPWNIEEKVDFGKSAVDFIEKMTNKDTYLPKENVLPKHSLCYQKYLVYNELTKVRYINDQGKTSYFSGQEKEQIFNDLFKQKRKVKKKDLELFLRNMSHVESPTIEGLEDSFNSSYSTYHDLLKVGIKQEILDNPVNTEMLENIVKILTVFEDKRMIKEQLQQFSDVLDGVVLKKLERRHYTGWGRLSAKLLMGIRDKQSHLTILDYLMNDDGLNRNLMQLINDSNLSFKSIIEKEQVTTADKDIQSIVADLAGSPAIKKGILQSLKIVDELVSVMGYPPQTIVVEMARENQTTGKGKNNSRPRYKSLEKAIKEFGSQILKEHPTDNQELRNNRLYLYYLQNGKDMYTGQDLDIHNLSNYDIDHIVPQSFITDNSIDNLVLTSSAGNREKGDDVPPLEIVRKRKVFWEKLYQGNLMSKRKFDYLTKAERGGLTEADKARFIHRQLVETRQITKNVANILHQRFNYEKDDHGNTMKQVRIVTLKSALVSQFRKQFQLYKVRDVNDYHHAHDAYLNGVVANTLLKVYPQLEPEFVYGDYHQFDWFKANKATAKKQFYTNIMLFFAQKDRIIDENGEILWDKKYLDTVKKVMSYRQMNIVKKTEIQKGEFSKATIKPKGNSSKLISRKTNWDPMKYGGLDSPNMAYAVVIEYAKGKNKLVFEKKIIRVTIMERKAFEKDEKAFLEEQGYRQPKVLAKLPKYTLYECEEGRRRMLASANEAQKGNQQVLPNHLVTLLHHVANCEVSDGKSLDYIESNREMFAELLAHVSEFAKRYTLAEANLNKINQLFEQNKEGDIKAIAQSFVDLMAFNAMGAPASFKFFETTIERKRYNNLKELLNSTIIYQSITGLYESRKRLDD

SEQ ID NO: 236 - protein, 1337 aa, Listeria innocua
MKNMKKPYTIGLDIGTNSVGWAVLTDQYDLVKRKMKIAGDSEKKQIKKNFWGVRLFDEGQTAADRRMARTARRRIERRRNRISYLQGIFAEEMSKTDANFFCRLSDSFYVDNEKRNSRHPFFATIEEEVEYHKNYPTIYHLREELVNSSEKADLRLVYLALAHIIKYRGNFLIEGALDTQNTSVDGIYKQFIQTYNQVFASGIEDGSLKKLEDNKDVAKILVEKVTRKEKLERILKLYPGEKSAGMFAQFISLIVGSKGNFQKPFDLIEKSDIECAKDSYEEDLESLLALIGDEYAELFVAAKNAYSAVVLSSIITVAETETNAKLSASMIERFDTHEEDLGELKAFIKLHLPKHYEEIFSNTEKHGYAGYIDGKTKQADFYKYMKMTLENIEGADYFIAKIEKENFLRKQRTFDNGAIPHQLHLEELEAILHQQAKYYPFLKENYDKIKSLVTFRIPYFVGPLANGQSEFAWLTRKADGEIRPWNIEEKVDFGKSAVDFIEKMTNKDTYLPKENVLPKHSLCYQKYLVYNELTKVRYINDQGKTSYFSGQEKEQIFNDLFKQKRKVKKKDLELFLRNMSHVESPTIEGLEDSFNSSYSTYHDLLKVGIKQEILDNPVNTEMLENIVKILTVFEDKRMIKEQLQQFSDVLDGVVLKKLERRHYTGWGRLSAKLLMGIRDKQSHLTILDYLMNDDGLNRNLMQLINDSNLSFKSIIEKEQVTTADKDIQSIVADLAGSPAIKKGILQSLKIVDELVSVMGYPPQTIVVEMARENQTTGKGKNNSRPRYKSLEKAIKEFGSQILKEHPTDNQELRNNRLYLYYLQNGKDMYTGQDLDIHNLSNYDIDHIVPQSFITDNSIDNLVLTSSAGNREKGDDVPPLEIVRKRKVFWEKLYQGNLMSKRKFDYLTKAERGGLTEADKARFIHRQLVETRQITKNVANILHQRFNYEKDDHGNTMKQVRIVTLKSALVSQFRKQFQLYKVRDVNDYHHAHDAYLNGVVANTLLKVYPQLEPEFVYGDYHQFDWFKANKATAKKQFYTNIMLFFAQKDRIIDENGEILWDKKYLDTVKKVMSYRQMNIVKKTEIQKGEFSKATIKPKGNSSKLISRKTNWDPMKYGGLDSPNMAYAVVIEYAKGKNKLVFEKKIIRVTIMERKAFEKDEKAFLEEQGYRQPKVLAKLPKYTLYECEEGRRRMLASANEAQKGNQQVLPNHLVTLLHHVANCEVSDGKSLDYIESNREMFAELLAHVSEFAKRYTLAEANLNKINQLFEQNKEGDIKAIAQSFVDLMAFNAMGAPASFKFFETTIERKRYNNLKELLNSTIIYQSITGLYESRKRLDD

SEQ ID NO: 237 - protein, 1103 aa, Listeria innocua
LKLYPGEKSTGMFAQFISLIVGSKGNFQKPFDLIEKSDIECAKDSYEEDLESLLALIGDEYAELFVAAKNAYSAVVLSSIITVAETETNAKLSASMIERFDTHEEDLGELKAFIKLHLPKHYEEIFSNTEKHGYAGYIDGKTKQADFYKYMKTTLENIEGADYFIAKIEKENFLRKQRTFDNGAIPHQLHLEELEAILHQQAKYYPFLKENYDKIKSLVTFRIPYFVGPLANGQSEFAWLTRKADGEIRPWNIEEKVDFGKSAVDFIEKMTNKDTYLPKENVLPKHSLCYQKYLVYNELTKVRYINDQGKTSYFSGQEKEQIFNDLFKQKRKVKKKDLELFLRNMSHVESPTIEGLEDSFNSSYSTYHDLLKVGIKQEILDNPVNTEMLENIVKILTVFEDKRMIKEQLQQFSDVLDGVVLKKLERRHYTGWGRLSAKLLMGIRDKQSHLTILDYLMNDDGLNRNLMQLINDSNLSFKSIIEKEQVTTADKDIQSIVADLAGSPAIKKGILQSLKIVDELVSVMGYPPQTIVVEMARENQTTGKGKNNSRPRYKSLEKAIKEFGSQILKEHPTDNQELKNNRLYLYYLQNGKDMYTGQDLDIHNLSNYDIDHIVPQSFITDNSIDNLVLTSSAGNREKGNDVPPLEIVQKRKVFWEKLYQGNLMSKRKFDYLTKAERGGLTEADKARFIHRQLVETRQITKNVANILHQRFNYGKDDHGNTMKQVRIVTLKSALVSQFRKQFQLYKVRGVNDYHHAHDAYLNGVVANTLLKVYPQLEPEFVYGDYHQFDWFKANKATAKKQFYTNIMLFFAQKDRIIDENGEILWDKKYLDTVKKVMSYRQMNIVKKTEIQKGEFSKATIKPKGNSSKLIPRKTNWDPMKYGGLDSPNMAYAVVIEYAKGKNKLVFEKKIIRVTIMERKAFEKDEKAFLEEQGYRQPKVLAKLPKYTLYECEEGRRRMLASANEAQKGNQQVLPNHLVTLLHHAANCEVSDGKSLDYIESNREMFAELLAHVSEFAKRYTLAEANLNKINQLFEQNKEGDIKAIAQSFVDLMAFNAMGAPASFKFFETTIERKRYNNLKELLNSTIIYQSITGLYESRKRLDD

SEQ ID NO: 238 - protein, 1334 aa, Listeria ivanovii
MRKPYTIGLDIGTNSVGWAVLTDQYNLVKRKMKVAGSAEKKQIKKNFWGVRLFDEGEVAAGRRMNRTTRRRIERRRNRIAYLQEIFAAEMAEVDANFFYRLEDSFYIESEKRHSRHPFFATIEEEVAYHEEYKTIYHLREKLVNSSDKADLRLVYLALAHIIKYRGNFLIEGMLDTKNTSVDEVFKQFIQTYNQIFASDIEEGSLTRLEENKEVAEILSEKLTRREKLDKILKLYTGEKSTGMFARFINLIIGSKGDFKKVFDLDEKAEIECAKDTYEEDLEALLAKIGDEYAEIFVAAKSTYNAVVLSNIITVTDTETKAKLSASMIERFDKHAKDLKRLKAFFKMQLPEKFNEVFNDIEKDGYAGYIDGKTTQEKFYKYMKKMLANIDGADYFIDQIEEENFLRKQRTFDNGTIPHQLHLEELEAILHQQAKYYPFLRKDYEKIRSLVTFRIPYFIGPLANGQSDFAWLTRKADGEIRPWNIEEKVDFGKSAIDFIEKMTNKDTYLPKENVLPKHSLCYQKYMVYNELTKIRYIDDQGKTHHFSGQEKQQIFNGLFKQQRKVKKKDLERFLYTINHIESPTIEGVEDAFNSSFATYHDLQKGGVTQEILDNPLNADMLEEIVKILTVFEDKRMIKEQLQSFSDVLDGTILKKLERRHYTGWGRLSAKLLTGIRDKHSHLTILDYLMNDDGLNRNLMQLINDSNLSFKSIIEKEQVSTADKGIQSIVAELAGSPAIKKGILQSLKIVDELVGIMGYPPQTIVVEMARENQTTGKGKNNSKPRFISLEKAIKEFGSQILKEHPTDNQCLKNDRLYLYYLQNGKDMYTGKELDIHNLSNYDIDHIIPQSFITDNSIDNRVLVSSTANREKGDNVPLLEVVRKRKAFWEKLYQAKLMSKRKFDYLTKAERGGLTEADKANFIQRQLVETRQITKNVANILYQRFNCKQDENGNEVEQVRIVTLKSTLVSQFRKQFQLYKVREVNDYHHAHDAYLNGVVANTLLKVYPQLEPEFVYGDYHQFDWFKANKATAKKQFYTNIMRFFAKENQIIDKNGEILWDNRYLDTIKKVLSYRQMNIVKKTEIQKGEFSNATVNPKGNSSKLISRKADWNPIKYGGFDGSNMAYSIVIEYEKRKKKTVIKKELIQINIMERVAFEKDQKAFLEEKGYYSPKVLTKIPKYTLYECENGRRRMLGSANEAQKGNQMVLPNHLMTLLYHAKNCEANDGESLAYIEMHREMFAELLAYISEFAKRYTLANDRLEKINMFFEQNKKGDIKVIAKSFDKLKVFNAFGAPRDFEFFETTIKRKRYYNIKELLNATIIYQSITGLYEARKRLED

SEQ ID NO: 239 - protein, 953 aa, Listeria ivanovii
MKKMLANIDGADYFIDQIEEENFLRKQRTFDNGTIPHQLHLEELEAILHQQAKYYPFLRKDYEKIRSLVTFRIPYFIGPLANGQSDFAWLTRKADGEIRPWNIEEKVDFGKSAIDFIEKMTNKDTYLPKENVLPKHSLCYQKYMVYNELTKIRYIDDQGKTHHFSGQEKQQIFNGLFKQQRKVKKKDLERFLYTINHIESPTIEGVEDAFNSSFATYHDLQKGGVTQEILDNPLNADMLEEIVKILTVFEDKRMIKEQLQSFSDVLDGTILKKLERRHYTGWGRLSAKLLTGIRDKHSHLTILDYLMNDDGLNRNLMQLINDSNLSFKSIIEKEQVSTADKGIQSIVAELAGSPAIKKGILQSLKIVDELVGIMGYPPQTIVVEMARENQTTGKGKNNSKPRFISLEKAIKEFGSQILKEHPTDNQCLKNDRLYLYYLQNGKDMYTGKELDIHNLSNYDIDHIIPQSFITDNSIDNRVLVSSTANREKGDNVPLLEVVRKRKAFWEKLYQAKLMSKRKFDYLTKAERGGLTEADKANFIQRQLVETRQITKNVANILYQRFNCKQDENGNEVEQVRIVTLKSTLVSQFRKQFQLYKVREVNDYHHAHDAYLNGVVANTLLKVYPQLEPEFVYGDYHQFDWFKANKATAKKQFYTNIMRFFAKENQIIDKNGEILWDNRYLDTIKKVLSYRQMNIVKKTEIQKGEFSNATVNPKGNSSKLISRKADWNPIKYGGFDGSNMAYSIVIEYEKRKKKTVIKKELIQINIMERVAFEKDQKAFLEEKGYYSPKVLTKIPKYTLYECENGRRRMLGSANEAQKGNQMVLPNHLMTLLYHAKNCEANDGESLAYIEMHREMFAELLAYISEFAKRYTLANDRLEKINMFFEQNKKGDIKVIAKSFDKLKVFNAFGAPRDFEFFETTIKRKRYYNIKELLNATIIYQSITGLYEARKRLED

SEQ ID NO: 240 - protein, 1334 aa, Listeria monocytogenes
MKNPYTIGLDIGTNSVGWAVLTNQYDLVKRKMKVAGNSDKKQIKKNFWGVRLFDDGQTAVDRRMNRTARRRIERRRNRISYLQEIFAVEMANIDANFFCRLNDSFYVDSEKRNSRHPFFATIEEEVAYHDNYRTIYHLREKLVNSSEKADLRLVYLALAHIIKYRGNFLIEGALDTKNTSVDEVYKQFIETYNQVFMSNIEEGALAKVEENIEVANILAGKFTRREKFERILQLYPGEKSTGMFAQFISLIVGSKGNFQKVFDLIEKTDIECAKDSYEEDLETLLAIIGDEYAELFVAAKNTYNAVVLSSIITVTDTETNAKLSASMIERFDAHEKDLVELKAFIKLNLPKQYEEIFSNAAIDGYAGYIDGKTKQVDFYKYLKTILENIEGSDYFIAKIEEENFLRKQRTFDNGAIPHQLHLEELEAIIHQQAKYYPFLKEDYDKIKSLVTFRIPYFVGPLANGQSEFAWLTRKADGEIRPWNIEEKVDFGKSAVDFIEKMTNKDTYLPKENVLPKHSLCYQKYMVYNELTKIRYIDDQGKTNYFSGREKQQVFNDLFKQKRKVKKKDLELFLRNINHIESPTIEGLEDSFNASYATYHDLLKVGMKQEILDNPLNTEMLEDIVKILTVFEDKPMIKEQLQQFSDVLDGGVLKKLERRHYTGWGRLSAKLLVGIREKQSHLTILDYLMNDDGLNRNLMQLINDSNLSFKSIIEKEQVSTTDKDLQSIVAELAGSPAIKKGILQSLKIVDELVSIMGYPPQTIVVEMARENQTTGKGKNNSKPRYKSLEKAIKEFGSQILKEHPTDNQELKNNRLYLYYLQNGKDMYTGQELDIHNLSNYDIDHIVPQSFITDNSIDNLVLTSSAGNREKGGDVPPLEIVRKRKVFWEKLYQGNLMSKRKFDYLTKAERGGLTEADKARFIHRQLVETRQITKNVANILYQRFNKETDNHGNTMEQVRIVTLKSALVSQFRKQFQLYKVREVNGYHHAHDAYLNGVVANTLLKVYPQLEPEFVYGEYHQFDWFKANKATAKKQFYTNIMLFFAQKERIIDENGEILWDKKYLETIKKVLDYRQMNIVKKTEIQKGEFSKATIKPKGNSSKLIPRKENWDPMKYGGLDSPNMAYAVIIEHAKGKKKIVIEKKLIQINIMERKMFEKDEEAFLEEKGYRHPKVLTKLPKYTLYECEKGRRRMLASANEAQKGNQLVLSNHLVSLLYHAKNCEASDGKSLKYIEAHRETFSELLAQVSEFATRYTLADANLSKINNLFEQNKEGDIKAIAQSFVDLMAFNAMGAPASFKFFEATIDRKRYTNLKELLSSTIIYQSITGLYESRKRLDD

SEQ ID NO: 241 - protein, 1334 aa, Listeria monocytogenes
MKNPYTIGLDIGTNSVGWAVLTDQYDLVKRKMKVAGNSDKKQIKKNFWGVRLFDDGQTAVDRRMNRTARRRIERRRNRISYLQEIFAVEMANIDANFFCRLNDSFYVDSEKRNSRHPFFATIEEEVAYHKNYRTIYHLREELVNSSEKADLRLVYLALAHIIKYRGNFLIEGALDTKNTSVDEVYKQFIQTYNQVFMSNIEEGALAKVEENTEVASILAGKFTRREKFERILRLYPGEKSTGMFAQFISLIVGNKGNFQKVFNLVEKTDIECAKDSYEEDLEALLAIIGDEYAELFVAAKNTYNAVVLSSIITVTATETNAKLSASMIERFDAHEKELGELKAFIKLHLPKQYQEIFNNAEIDGYAGYIDGKTKQVDFYKYLKTTLENVEGADYFITKIEEENFLRKQRTFDNGVIPHQLHLEELEAILHQQAKYYPFLREGYDKIKSLVTFRIPYFVGPLANGQSEFAWLTRKDDGEIRPWNIEEKVDFGKSAVDFIEKMTNKDTYLPKENVLPKHSLCYQKYMVYNELTKIRYIDDQGKTNYFSGREKQQIFNDLFKQKRKVKKKDLELFLRNINHIESPTIEGLEDSFNASYATYHDLLKVGLKQEILDNPLNTEILEDIVKILTVFEDKRMIKEQLEQFSDVLDGVVLKKLERRHYTGWGRLSAKLLVGIRDKQSHLTILDYLMNDDGLNRNLMQLINDSNLSFKSIIEKEQVSTTDKDLQSIVADLAGSPAIKKGILQSLKIVDELVSIMGYPPQTIVVEMARENQTTGKGKNNSKPRYKSLEKAIKDFGSQILKEHPTDNQELKNNRLYLYYLQNGKDIYTGQELDIHNLSNYDIDHIVPQSFITDNSIDNLVLTSSAGNREKGGDVPPLEIVRKRKVFWEKLYQGNLMSKRKFDYLTKAERGGLTEADKARFIHRQLVETRQITKNVANILHQRFNKETDNHGNTMEQVRIVTLKSALVSQFRKQFQLYKVREVNDYHHAHDAYLNGVVANTLLKVYPQLEPEFVYGEYHQFDWFKANKATAKKQFYTNIMLFFAQKERIIDENGEILWDKKYLETIKKVLDYRQINIVKKTEIQKGEFSKATIKPKGNSSKLIPRKENWDPMKYGGLDSPNMAYAVIIEHAKGKKKIVIEKKLIQINIMERKMFEKDEEAFLEEKGYHQPKVLTKLPKYTLYECEKGRRRMLSSANEAQKGNQLVLSNHLVSLLYHAKNCEASDGKSLKYIEAHRETFSELLAQVSEFATKYTLADANLSKINNLFEQNKEGDIKAIAQSFVDLMAFNAMGAPASFKFFEATIDRKRYTNLKELLSSTIIYQSITGLYESRKRLDD

SEQ ID NO: 242 - protein, 1334 aa, Listeria monocytogenes
MKNPYTIGLDIGTNSVGWAVLTDQYDLVKRKMKVAGNSDKKQIKKNFWGVRLFDDGQTAVDRRMNRTARRRIERRRNRISYLQEIFAVEMANIDANFFCRLNDSFYVDSEKRNSRHPFFATIEEEVAYHKNYRTIYHLREELVNSSEKADLRLVYLALAHIIKYRGNFLIEGALDTKNTSVDEVYKQFIQTYNQVFMSNIEEGALAKVEENTEVASILAGKFTRREKFERILRLYPGEKSTGMFAQFISLIVGNKGNFQKVFNLVEKTDIECAKDSYEEDLEALLAIIGDEYAELFVAAKNTYNAVVLSSIITVTATETNAKLSASMIERFDAHEKELGELKAFIKLHLPKQYQEIFNNAEIDGYAGYIDGKTKQVDFYKYLKTTLENVEGADYFITKIEEENFLRKQRTFDNGVIPHQLHLEELEAILHQQAKYYPFLREGYDKIKSLVTFRIPYFVGPLANGQSEFAWLTRKDDGEIRPWNIEEKVDFGKSAVDFIEKMTNKDTYLPKENVLPKHSLCYQKYMVYNELTKIRYIDDQGKTNYFSGREKQQIFNDLFKQKRKVKKKDLELFLRNINHIESPTIEGLEDSFNASYATYHDLLKVGLKQEILDNPLNTEILEDIVKILTVFEDKRMIKEQLEQFSDVLDGVVLKKLERRHYTGWGRLSAKLLVGIRDKQSHLTILDYLMNDDGLNRNLMQLINDSNLSFKSIIEKEQVSTTDKDLQSIVADLAGSPAIKKGILQSLKIVDELVSIMGYPPQTIVVEMARENQTTGKGKNNSKPRYKSLEKAIKDFGSQILKEHPTDNQELKNNRLYLYYLQNGKDIYTGQELDIHNLSNYDIDHIVPQSFITDNSIDNLVLTSSAGNREKGGDVPPLEIVRKRKVFWEKLYQGNLMSKRKFDYLTKAERGGLTEADKARFIHRQLVETRQITKNVANILHQRFNKETDNHGNTMEQVRIVTLKSALVSQFRKQFQLYKVREVNDYHHAHDAYLNGVVANTLLKVYPQLEPEFVYGEYHQFDWFKANKATAKKQFYTNIMLFFAQKERIIDENGEILWDKKYLETIKKVLDYRQINIVKKTEIQKGEFSKATIKPKGNSSKLIPRKENWDPVKYGGLDSPNMAYAVIIEHAKGKKKIVIEKKLIQINIMERKMFEKDEEAFLEEKGYHQPKVLTKLPKYTLYECEKGRRRMLSSANEAQKGNQLVLSNHLVSLLYHAKNCEASDGKSLKYIEAHRETFSELLAQVSEFATKYTLADANLSKINNLFEQNKEGDIKAIAQSFVDLMAFNAMGAPASFKFFEATIDRKRYTNLKELLSSTIIYQSITGLYESRKRLDD

SEQ ID NO: 243 - protein, 1334 aa, Listeria monocytogenes
MKKPYTIGLDIGTNSVGWAVLTDQYDLVKRKMKISGDSEKKQIKKNFWGVRLFEKGETAAKRRMSRTARRRIERRRNRISYLQEIFAIQMNEVDDNFFNRLKESFYAESDKKYNRHPFFGTVEEEVAYYKDFPTIYHLRKELIDSQKKADLRLVYLALAHIIKYRGHFLIEGALDTKNTSIDEMFKQFLQIYNQVFANDIEEASLKKTEKNQEVAQILAEKFTRKDKLDKILSLYPGEKTTGVFAQFVNIIVGSTGKFKKHFNLHEKKDINCAEDTYDTDLESLLAIIGDEFAEVFVAAKNAYNAVVLSNIITVTDSTTRAKLSASLIERFENHKEDLKKMKRFVRTYLPEKYDEIFDDTEKHGYAGYISGKTKQADFYKYMKATLEKIEGADYFIAKIEEENFLRKQRTFDNGVIPHQLHLEELEAILHQQAKYYPFLREDYEKIKSLVTFRIPYFVGPLAKGQSEFAWLTRKADGEIRPWNIEEKVDFGKSAVDFIEKMTNKDTYLPKENVLPKHSLCYQKYMVYNELTKVRYIDDQGKTNYFSGQEKQQIFNDLFKQKRKVKKKDLELFLRNINQIESPTIEGLEDSFNASYATYHDLLKVGMKQEILDNPLNTEMLEDIVKILTVFEDKRMIKEQLQQFSDVLDGTVLKKLERRHYTGWGRLSAKLLVGIRDKQSHLTILDYLMNDDGLNRNLMQLINDSNLSFKSIIEKEQVSTTDKDLQSIVAELAGSPAIKKGILQSLKIVDELVSVMGYPPQTIVVEMARENQTTNKGKNNSKPRYKSLEKAIKEFGSQILKEHPTDNQELKNNRLYLYYLQNGKDMYTGQELDIHNLSNYDIDHIVPQSFITDNSVDNLVLTSSAGNREKGDNVPPLEIVQKRKIFWEKLYQGNLMSKRKFDYLTKAERGGLTEADKARFIHRQLVETRQITKNVANILHQRFNYKTDGNKDTMETVRIVTLKSALVSQFRKQFQFYKVREVNDYHHAHDAYLNGVVANTLLKVYPQLEPEFVYGEYHQFGWFKANKATAKKQFYTNIMLFFAQKDRIIDENGEILWDKRYLETVKKVLGYRQMNIVKKTEIQKGEFSNVTPNPKGKSNKLIPRKKDWDPIKYGGFDGSKMAYAIIIEYEKQKRKVRIEKKLIQINIMEREAFEKDEKTFLEEKGYHQPKVLIKVPKYTLYECKNGRRRMLGSANEAHKGNQMLLPNHLMALLYHAEKYEAIDGESLAYIEVHRALFDELLAYISEFARKYTLSNDRLDEINMLYERNKDGDVKSIAESFVSLKKFNAFGVHQDFSFFGTKIERKRDRKLNELLNSTIIYQSITGLYESRKRLDN

SEQ ID NO: 244 - protein, 1334 aa, Listeria monocytogenes
MKNPYTIGLDIGTNSVGWAVLTDQYDLVKRKMKVAGNSDKKQIKKNFWGVRLFDEGETAADRRMNRTARRRIERRRNRISYLQEIFALEMANIDANFFCRLNDSFYVDSEKRNSRHPFFATIEEEVAYHKNYRTIYHLREELVNSSEKADLRLVYLALAHIIKYRGNFLIEGALDTKNTSVDGVYKQFIQTYNQVFISNIEEGTLAKMEENTTVADILAGKFTRKEKLERILQLYPGEKSTGMFAQFISLIVGSKGNFQKVFDLVEKTDIECAKDSYEEDLEALLAIIGDEYAELFVAAKNTYNAVVLSSIITVTDTETNAKLSASMIERFDAHEKDLSELKAFIKLHLPKQYEEIFSNVAIDGYAGYIDGKTKQVDFYKYLKTLLENIEGADYFIAKIEEENFLRKQRTFDNGAIPHQLHLEELEAILHQQAKYYPFLKEAYDKIKSLVTFRIPYFVGPLANGQSDFAWLTRKADGEIRPWNIEEKVDFGKSAVDFIEKMTNKDTYLPKENVLPKHSLYYQKYMVYNELTKVRYIDDQGKTNYFSGQEKQQIFNDYFKQKRKVSKKDLEQFLRNMSHIESPTIEGLEDSFNSSYATYHDLLKVGIKQEVLENPLNTEMLEDIVKILTVFEDKRMIKEQLQQFSDVLDGAVLKKLERRHYTGWGRLSAKLLVGIRDKQSHLTILDYLMNDDGLNRNLMQLINDSNLSFKSIIEKEQVSTTDKDLQSIVADLAGSPAIKKGILQSLKIVDELVSIMGYPPQTIVVEMARENQTTVKGKNNSRPRYKSLEKAIKEFGSQILKEHPTDNQELRNNRLYLYYLQNGKDMYTGQELDIHNLSNYDIDHIVPQSFITDNSIDNLVLTSSAGNREKGDDVPPLEIVRKRKVFWEKLFQGNLMSKRKFDYLTKAERGGLTEADKATFIHRQLVETRQITKNVANILHQRFNNETDNHGNNMEQVRIVMLKSALVSQFRKQFQLYKVREVNDYHHAHDAYLNGVVANTLLKVYPQLEPEFVYGEYHQFDWFKANKATAKKQFYTNIMLFFAQKERIIDENGEILWDKKYLETIKKVLDYRQMNIVKKTEIQKGEFSKATIKPKGNSSKLIPRKENWDPMKYGGLDSPNMAYAVIIEHAKGKKKVVFEKKIIRITIMERKAFEKDEKSFLEKQGYRQPKVLTKLPKYTLYECENGRRRMLASANEAQKGNQQVLKGQLITLLHHAKNCEASDGKSLDYIESNREMFGELLAHVSEFAKRYTLADANLSKINQLFEQNKDNDIKVIAQSFVNLMAFNAMGAPASFKFFEATIERKRYTNLKELLSATIIYQSITGLYEARKRLDG

SEQ ID NO: 245 - protein, 1334 aa, Listeria monocytogenes
MKNPYTIGLDIGTNSVGWAVLTNQYDLVKRKMKVAGNSDKKQIKKNFWGVRLFDDGQTAVDRRMNRTARRRIERRRNRISYLQEIFAVEMANIDANFFCRLNDSFYVDSEKRNSRHPFFATIEEEVAYHKNYRTIYHLREELVNSSEKADLRLVYLALAHIIKYRGNFLIEGALDTKNTSVDGVYEQFIQTYNQVFMSNIEEGTLAKVEENIEVANILAGKFTRREKFERILQLYPGEKSTGMFAQFISLIVGSKGNFQKVFDLIEKTDIECAKDSYEEDLEALLAIIGDEYAELFVAAKNTYNAVVLSSIITVTATETNAKLSASMIERFDAHEKDLGELKAFIKLHLPKQYQEIFNNAAIDGYAGYIDGKTKQVDFYKYLKTILENIEGADYFIAKIEEENFLRKQRTFDNGAIPHQLHLEELEAIIHQQAKYYPFLREDYEKIKSLVTFRIPYFVGPLAKGQSEFAWLTRKADGEIRPWNIEEKVDFGKSAVDFIEKMTNKDTYLPKENVLPKHSLCYQKYMVYNELTKVRYIDDQGKTNYFSGQEKQQIFNDLFKQKRKVKKKDLELFLRNINHIESPTIEGLEDSFNASYATYHDLLKVGMKQEILDNPLNTEMLEDIVKILTVFEDKPMIKEQLQQFSDVLDGGVLKKLERRHYTGWGRLSAKLLVGIREKQSHLTILDYLMNDDGLNRNLMQLINDSNLSFKSIIEKEQVSTTDKDLQSIVADLAGSPAIKKGILQSLKIVDELVSIMGYPPQTIVVEMARENQTTGKGKNNSKPRYKSLEKAIKEFGSKILKEHPTDNQELKNNRLYLYYLQNGKDMYTGQELDIHNLSNYDIDHIVPQSFITDNSIDNLVLTSSAGNREKGGDVPPLEIVRKRKVFWEKLYQGNLMSKRKFDYLTKAERGGLTDADKARFIHRQLVETRQITKNVANILHQRFNNETDNHGNTMEQVRIVTLKSALVSQFRKQFQLYKVREVNDYHHAHDAYLNGVVANTLLKVYPQLEPEFVYGEYHQFDWFKANKATAKKQFYTNIMLFFGQKERIIDENGEILWDKKYLETIKKVLDYRQMNIVKKTEIQKGEFSKATIKPKGNSSKLIPRKENWDPMKYGGLDSPNMAYAVIIEHAKGKKKLIFEKKIIRITIMERKMFEKDEEAFLEEKGYRHPKVLTKLPKYTLYECEKGRRRMLASANEAQKGNQLVLSNHLVSLLYHAKNCEASDGKSLKYIEAHRETFSELLAQVSEFATRYTLADANLSKINNLFEQNKEGDIQAIAQSFVDLMAFNAMGAPASFKFFEATIDRKRYTNLKELLSSTIIYQSITGLYESRKRLDD

SEQ ID NO: 246 - protein, 1334 aa, Listeria monocytogenes
MKNPYTIGLDIGTNSVGWAVLTNQYDLVKRKMKVAGNSDKKQIKKNFWGVRLFDDGQTAVDRRMNRTARRRIERRRNRISYLQEIFAVEMANIDANFFCRLNDSFYVDSEKRNSRHPFFATIEEEVAYHKNYRTIYHLREELVNSSEKADLRLVYLALAHIIKYRGNFLIEGALDTKNTSVDGVYEQFILTYNQVFMSNIEEGTLAKVEENIEVANILAGKFTRREKFERILQLYPGEKSTGMFAQFISLIVGSKGNFQKVFDLIEKTDIECAKDSYEEDLETLLAIIGDEYAELFVAAKNTYNAVVLSSIITVTDTETNAKLSASMIERFDAHEKDLVELKAFIKLNLPKQYEEIFSNAAIDGYAGYIDGKTKQVDFYKYLKTTLENVEGADYFITKIEEENFLRKQRTFDNGVIPHQLHLEELEAILHQQAKYYPFLREDYEKIKSLVTFRIPYFVGPLAKGQSEFAWLTRKADGEIRPWNIEEKVDFGKSAVDFIEKMTNKDTYLPKENVLPKHSLCYQKYMVYNELTKIRYIDDQGKTNYFSGQEKQQIFNDLFKQKRKVKKKDLELFLRNINHVESPTIEGLEDSFNASYATYHDLMKVGIKQEILDNPLNTEMLEDIVKILTVFEDKRMIKEQLQQFSDVLDGTVLKKLERRHYTGWGRLSAKLLVGIRDKQSHLTILDYLMNDDGLNRNLMQLINDSNLSFKSIIEKEQVSTADKDLQSIVADLAGSPAIKKGILQSLKVVEELVSVMGYPPQTIVVEMARENQTTNKGKNNSKPRYKSLEKAIKEFGSQILKEHPTDNQELKNNRLYLYYLQNGKDMYTGQELDIHNLSNYDIDHIVPQSFITDNSIDNLVLTSSAGNREKGDNVPPLEIVQKRKIFWEKLYQGNLMSKRKFDYLTKAERGGLTEADKARFIHRQLVETRQITKNVANILHQRFNYKTDDNEDTMEPVRIVTLKSALVSQFRKQFQLYKVREVNDYHHAHDAYLNGVVANTLLKVYPQLEPEFVYGEYHQFDWFKANKATAKKQFYTNIMLFFAQKERIIDENGEILWDKKYLETIKKVLNYRQMNIVKKTEIQKGEFSNQNPKPRGDSSKLIPKKTNLNPIKYGGFEGSNMAYAIIIEHEKRKKKVTIEKKLIQINIMERKAFEKDEKVFLEGKGYHQPKVLTKLPKYALYECENGRRRMLGSANEVHKGNQMLLPNHLMTLLYHAEKREAIDGESLAYIEAHKAVFGELLAHISEFARKYTLANDKLDEINMLYERNKDGDVKSIAESFVSLKKFNAFGVHKDFNFFGTTIKRKRDRKLKELLNSTIIYQSITGLYESRKRLDS

SEQ ID NO: 247 - protein, 1334 aa, Listeria monocytogenes
MKNPYTIGLDIGTNSVGWAVLTDQYDLVKRKMKVAGNSDKKQIKKNFWGVRLFDDGQTAVDRRMNRTARRRIERRRNRISYLQEIFAVEMANIDANFFCRLNDSFYVDSEKRNSRHPFFATIEEEVAYHKNYRTIYHLREELVNSSEKADLRLVYLALAHIIKYRGNFLIEGALDTKNTSVDGVYEQFIQTYNQVFMSNIEEGTLAKVEENIEVANILAGKFTRREKFERILQLYPGEKSTGMFAQFISLIVGSKGNFQKVFDLIEKTDIECAKDSYEEDLETLLAIIGDEYAELFVAAKNTYNAVVLSSIITVNDTETNAKLSASMIERFDAHEKDLVELKAFIKLNLPKQYEEIFSNAAIDGYAGYIDGKTKQVDFYKYLKTILENIEGSDYFIAKIEEENFLRKQRTFDNGAIPHQLHLEELEAIIHQQAKYYTFLKEDYDKIKSLVTFRIPYFVGPLANGQSEFAWLTRKADGEIRPWNIEEKVDFGKSAVDFIEKMTNKDTYLPKENVLPKHSLCYQKYMVYNELTKVRYIDDQGKTNYFSGQEKQQIFNDLFKQKRKVKKKDLELFLRNINQIESPTIEGLEDSFNASYATYHDLLKVGMKQEILDNPLNTEMLEDIVKILTVFEDKRMIKEQLQQFSDVLDGVVLKKLERRHYTGWGRLSAKLLVGIRDKQSHLTILEYLMNDDGLNRNLMQLINDSNLSFKSIIEKEQVSTTDKDLQSIVAELAGSPAIKKGILQSLKIVDELVSIMGYPPQTIVVEMARENQTTGKGKNNSKPRYKSLEKAIKEFGSQILKEHPTDNQELKNNRLYLYYLQNGKDMYTGQELDIHNLSNYDIDHIVPQSFITDNSIDNLVLTSSAGNREKGGDVPPLEIVRKRKVFWEKLYQGNLMSKRKFDYLTKAERGGLTEADKARFIHRQLVETRQITKNVANILHQRFNKETDNHGNTMEQVRIVTLKSALVSQFRKQFQLYKVREVNDYHHAHDAYLNGVVANTLLKVYPQLEPEFVYGEYHQFDWFKANKATAKKQFYTNIMLFFAQKERIIDENGEILWDKKYLETIKKVLDYRQMNIVKKTEIQKGEFSKATIKPKGNSSKLIPRKENWDPMKYGGLDSPNMAYAVIIEHAKGKKRIVIEKKLIQINIMERKMFEKDEEAFLEEKGYRHPKVLTKLPKYTLYECEKGRRRMLASANEAQKGNQLVLSNHLVSLLYHAKNCEASDGKSLKYIEAHRETFSELLAQVSEFATRYTLADANLSKINNLFEQNKEGDIKAIAQSFVDLMAFNAMGAPASFKFFEATIDRKRYTNLKELLSSTIIYQSITGLYESRKRLDD

SEQ ID NO: 248 - protein, 1334 aa, Listeria monocytogenes
MKKPYTIGLDIGTNSVGWAVLTDQYDLVKRKMKISGDSEKKQIKKNFWGVRLFEKGETAAKRRMSRTARRRIERRRNRISYLQEIFAIQMNEVDDNFFNRLKESFYAESDKKYNRHPFFGTVEEEVAYYKDFPTIYHLRKELIDSQKKADLRLVYLALAHIIKYRGHFLIEGALDTKNTSIDEMFKQFLQIYNQVFANDIEEASLKKTEKNQEVAQILAEKFTRKDKLDKILSLYPGEKTTGVFAQFVNIIVGSTGKFKKHFNLHEKKDINCAEDTYDTDLESLLAIIGDEFAEVFVAAKNAYNAVVLSNIITVTDSTTRAKLSASLIERFENHKEDLKKMKRFVRTYLPEKYDEIFDDTEKHGYAGYISGKTKQADFYKYMKATLEKIEGADYFIAKIEEENFLRKQRTFDNGVIPHQLHLEELEAILHQQAKYYPFLREDYEKIKSLVTFRIPYFVGPLAKGQSEFAWLTRKADGEIRPWNIEEKVDFGKSAVDFIEKMTNKDTYLPKENVLPKHSLCYQKYMVYNELTKVRYIDDQGKTNYFSGQEKQQIFNDLFKQKRKVKKKDLELFLRNINQIESPTIEGLEDSFNASYATYHDLLKVGMKQEILDNPLNTEMLEDIVKILTVFEDKRMIKEQLQQFSDVLDGTVLKKLERRHYTGWGRLSAKLLVGIRDKQSHLTILDYLMNDDGLNRNLMQLINDSNLSFKSIIEKEQVSTADKDLQSIVADLAGSPAIKKGILQSLKIVDELVSVMGYPPQTIVVEMARENQTTNKGKNNSKPRYKSLEKAIKEFGSQILKEHPTDNQELKNNRLYLYYLQNGKDMYTGQELDIHNLSNYDIDHIVPQSFITDNSVDNLVLTSSAGNREKGDNVPPLEIVQKRKIFWEKLYQGNLMSKRKFDYLTKAERGGLTEADKARFIHRQLVETRQITKNVANILHQRFNYKTDGNKDTMETVRIVTLKSALVSQFRKQFQFYKVREVNDYHHAHDAYLNGVVANTLLKVYPQLEPEFVYGEYHQFDWFKANKATAKKQFYTNIMLFFAQKDRIIDENGEILWDKRYLETVKKVLGYRQMNIVKKTEIQKGEFSNVTPNPKGKSNKLIPRKKDWDPIKYGGFDGSKMAYAIIIEYEKQKRKVRIEKKLIQINIMEREAFEKDEKTFLEEKGYHQPKVLIKVPKYTLYECENGRRRMLGSANEAHKGNQMLLPNHLMALLYHAEKYEAIDGESLAYIEVHRALFDELLAYISEFARKYTLSNDRLDEINMLYERNKDGDVKSIAESFVSLKKFNAFGVHQDFSFFGTKIERKRDRKLNELLNSTIIYQSITGLYESRKRLDN

SEQ ID NO: 249 - protein, 1334 aa, Listeria monocytogenes
MKNPYTIGLDIGTNSVGWAVLTNQYDLVKRKMKVAGNSDKKQIKKNFWGVRLFDDGQTAVDRRMNRTARRRIERRRNRISYLQEIFAVEMANIDANFFCRLNDSFYVDSEKRNSRHPFFATIEEEVAYHKNYRTIYHLREELVNSSEKADLRLVYLALAHIIKYRGNFLIEGALDTKNTSVDGVYEQFIQTYNQVFMSNIEEGTLAKVEENIEVANILARKFTRREKFERILQLYPGEKSTGMFAQFISLIVGSKGNFQKVFDLIEKTDIECAKDSYEEDLETLLAIIGDEYAELFVAAKNTYNAVVLSSIITVTDTETNAKLSASMIERFDAHEKDLVELKAFIKLNLPKQYEEIFSNAAIDGYAGYIDGKTKQVDFYKYLKTILENIEGADYFIAKIEEENFLRKQRTFDNGAIPHQLHLEELEAIIHQQAKYYPFLREDYEKIKSLVTFRIPYFVGPLAKGQSEFAWLTRKADGEIRPWNIEEKVDFGKSAVDFIEKMTNKDTYLPKENVLPKHSLCYQKYMVYNELTKIRYIDDQGKTNYFSGQEKQQIFNDLFKQKRKVKKKDLELFLRNINHVESPTIEGLEDSFNASYATYHDLMKVGIKQEILDNPLNTEMLEDIVKILTVFEDKRMIKEQLQQFSDVLDGTVLKKLERRHYTGWGRLSAKLLVGIRDKQSHLTILDYLMNDDGLNRNLMQLINDSNLSFKSIIEKEQVSTADKDLQSIVADLAGSPAIKKGILQSLKVVEELVSVMGYPPQTIVVEMARENQTTNKGKNNSKPRYKSLEKAIKEFGSQILKEHPTDNQELKNNRLYLYYLQNGKDMYTGQELDIHNLSNYDIDHIVPQSFITDNSIDNLVLTSSAGNREKGDNVPPLEIVQKRKIFWEKLYQGNLMSKRKFDYLTKAERGGLTEADKARFIHRQLVETRQITKNVANILHQRFNYKTDDNEDTMEPVRIVTLKSALVSQFRKQFQLYKVREVNDYHHAHDAYLNGVVANTLLKVYPQLEPEFVYGEYHQFDWFKANKATAKKQFYTNIMLFFAQKERIIDENGEILWDKKYLETIKKVLNYRQMNIVKKTEIQKGEFSNQNPKPRGDSSKLIPKKTNLNPIKYGGFEGSNMAYAIIIEHEKRKKKVTIEKKLIQINIMERKAFEKDEKVFLEGKGYHQPKVLTKLPKYALYECENGRRRMLGSANEVHKGNQMLLPNHLMTLLYHAEKREAIDGESLAYIEAHKAVFGELLAHISEFARKYTLANDKLDEINMLYERNKDGDVKSIAESFVSLKKFNAFGVHKDFNFFGTTIKRKRDRKLKELLNSTIIYQSITGLYESRKRLDS

SEQ ID NO: 250 - protein, 1337 aa, Listeria monocytogenes
MKNMKNPYTIGLDIGTNSVGWAVLTNQYDLVKRKMKVAGNSDKKQIKKNFWGVRLFDDGQTAVDRRMNRTARRRIERRRNRISYLQEIFAVEMANIDANFFCRLNDSFYVDSEKRNSRHPFFATIEEEVAYHKNYRTIYHLREELVNSSEKADLRLVYLALAHIIKYRGNFLIEGALDTKNTSVDGVYEQFIQTYNQVFMSNIEEGTLAKVEENIEVANILAGKFTRREKFERILQLYPGEKSTGMFAQFISLIVGSKGNFQKVFDLIEKTDIECAKDSYEEDLEALLAIIGDEYAELFVAAKNTYNAVVLSSIITVTATETNAKLSASMIERFDAHEKDLGELKAFIKLHLPKQYQEIFNNAAIDGYAGYIDGKTKQVDFYKYLKTILENIEGADYFIAKIEEENFLRKQRTFDNGAIPHQLHLEELEAIIHQQAKYYPFLREDYEKIKSLVTFRIPYFVGPLAKGQSEFAWLTRKADGEIRPWNIEEKVDFGKSAVDFIEKMTNKDTYLPKENVLPKHSLCYQKYMVYNELTKVRYIDDQGKTNYFSGQEKQQIFNDLFKQKRKVKKKDLELFLRNINHIESPTIEGLEDSFNASYATYHDLLKVGMKQEILDNPLNTEMLEDIVKILTVFEDKPMIKEQLQQFSDVLDGGVLKKLERRHYTGWGRLSAKLLVGIREKQSHLTILDYLMNDDGLNRNLMQLINDSNLSFKSIIEKEQVSTTDKDLQSIVADLAGSPAIKKGILQSLKIVDELVSIMGYPPQTIVVEMARENQTTGKGKNNSKPRYKSLEKAIKEFGSKILKEHPTDNQELKNNRLYLYYLQNGKDMYTGQELDIHNLSNYDIDHIVPQSFITDNSIDNLVLTSSAGNREKGGDVPPLEIVRKRKVFWEKLYQGNLMSKRKFDYLTKAERGGLTDADKARFIHRQLVETRQITKNVANILHQRFNNETDNHGNTMEQVRIVTLKSALVSQFRKQFQLYKVREVNDYHHAHDAYLNGVVANTLLKVYPQLEPEFVYGEYHQFDWFKANKATAKKQFYTNIMLFFGQKERIIDENGEILWDKKYLETIKKVLDYRQMNIVKKTEIQKGEFSKATIKPKGNSSKLIPRKENWDPMKYGGLDSPNMAYAVIIEHAKGKKKLIFEKKIIRITIMERKMFEKDEEAFLEEKGYRHPKVLTKLPKYTLYECEKGRRRMLASANEAQKGNQLVLSNHLVSLLYHAKNCEASDGKSLKYIEAHRETFSELLAQVSEFATRYTLADANLSKINNLFEQNKEGDIQAIAQSFVDLMAFNAMGAPASFKFFEATIDRKRYTNLKELLSSTIIYQSITGLYESRKRLDD

SEQ ID NO: 251 - protein, 1337 aa, Listeria monocytogenes
MKNMKNPYTIGLDIGTNSVGWAVLTNQYDLVKRKMKVAGNSDKKQIKKNFWGVRLFDDGQTAVDRRMNRTARRRIERRRNRISYLQEIFAVEMANIDANFFCRLNDSFYVDSEKRNSRHPFFATIEEEVAYHKNYRTIYHLREELVNSSEKADLRLVYLALAHIIKYRGNFLIEGALDTKNTSVDGVYEQFIQTYNQVFMSNIEEGTLAKVEENIEVANILARKFTRREKFERILQLYPGEKSTGMFAQFISLIVGSKGNFQKVFDLIEKTDIECAKDSYEEDLETLLAIIGDEYAELFVAAKNTYNAVVLSSIITVTDTETNAKLSASMIERFDAHEKDLVELKAFIKLNLPKQYEEIFSNAAIDGYAGYIDGKTKQVDFYKYLKTILENIEGADYFIAKIEEENFLRKQRTFDNGAIPHQLHLEELEAIIHQQAKYYPFLREDYEKIKSLVTFRIPYFVGPLAKGQSEFAWLTRKADGEIRPWNIEEKVDFGKSAVDFIEKMTNKDTYLPKENVLPKHSLCYQKYMVYNELTKIRYIDDQGKTNYFSGQEKQQIFNDLFKQKRKVKKKDLELFLRNINHVESPTIEGLEDSFNASYATYHDLMKVGIKQEILDNPLNTEMLEDIVKILTVFEDKRMIKEQLQQFSDVLDGTVLKKLERRHYTGWGRLSAKLLVGIRDKQSHLTILDYLMNDDGLNRNLMQLINDSNLSFKSIIEKEQVSTADKDLQSIVADLAGSPAIKKGILQSLKVVEELVSVMGYPPQTIVVEMARENQTTNKGKNNSKPRYKSLEKAIKEFGSQILKEHPTDNQELKNNRLYLYYLQNGKDMYTGQELDIHNLSNYDIDHIVPQSFITDNSIDNLVLTSSAGNREKGDNVPPLEIVQKRKIFWEKLYQGNLMSKRKFDYLTKAERGGLTEADKARFIHRQLVETRQITKNVANILHQRFNYKTDDNEDTMEPVRIVTLKSALVSQFRKQFQLYKVREVNDYHHAHDAYLNGVVANTLLKVYPQLEPEFVYGEYHQFDWFKANKATAKKQFYTNIMLFFAQKERIIDENGEILWDKKYLETIKKVLNYRQMNIVKKTEIQKGEFSNQNPKPRGDSSKLIPKKTNLNPIKYGGFEGSNMAYAIIIEHEKRKKKVTIEKKLIQINIMERKAFEKDEKVFLEGKGYHQPKVLTKLPKYALYECENGRRRMLGSANEVHKGNQMLLPNHLMTLLYHAEKREAIDGESLAYIEAHKAVFGELLAHISEFARKYTLANDKLDEINMLYERNKDGDVKSIAESFVSLKKFNAFGVHKDFNFFGTTIKRKRDRKLKELLNSTIIYQSITGLYESRKRLDS

SEQ ID NO: 252 - protein, 782 aa, Listeria monocytogenes
  VARIANT 722: note = Any amino acid
IFNDLFKQKRKVKKKDLELFLRNINQIESPTIEGLEDSFNASYATYHDLLKVGMKQEILDNPLNTEMLEDIVKILTVFEDKRMIKEQLQQFSDVLDGVVLKKLERRHYTGWGRLSAKLLVGIRDKQSHLTILEYLMNDDGLNRNLMQLINDSNLSFKSIIEKEQVSTTDKDLQSIVADLAGSPAIKKGILQSLKIVDELVSIMGYPPQTIVVEMARENQTTVKGKNNSRPRYKSLEKAIKEFGSQILKEHPTDNQELKNNRLYLYYLQNGKDIYTGQELDIHNLSNYDIDHIVPQSFITDNSIDNLVLTSSAGNREKGDDVPPLEIVRKRKVFWEKLYQGNLMSKRKFDYLTKAERGGLTEADKARFIHRQLVETRQITKNVANILHQRFNNETDNHGNTMEQVRIVTLKSALVSQFRKQFQLYKVREVNDYHHAHDAYLNGVVANTLLKVYPQLEPEFVYGEYHQFDWFKANKATAKKQFYTNIMLFFAQKERIIDENGEILWDKKYLETIKKVLDYRQMNIVKKTEIQKGEFSKATIKPKGNSSKLIPRKENWDPMKYGGLDSPNMAYAVIIEHAKGKKKIVIEKKLIQINIMERKMFEKDEEAFLEEKGYRHPKVLTKLPKYTLYECEKGRRRMLASANEAQKGNQLVLSNHLVSLLYHAKNCEASDGKSLKYTEAHRETFSELLAQVSEFATRYTLADANLSKINNLFEQNKEGDIKXIAQSFVDLMVFNAMGAPASFKFFEATIDRKRYTNLKELLSSTIIYQSITGLYESRKRLDD

SEQ ID NO: 253 - protein, 1334 aa, Listeria seeligeri
MKKPYTIGLDIGTNSVGWAALTDQYDLVKRKMKVAGNSEKKQIKKNLWGVRLVDEGKTAAHRRVNRTTRRRIERRRNRISYLQEIFTAEMFEVDANFFYRLEDSFYIESEKRQSRHPFFATIEEEVAYHENYRTIYHLREKLVNSSDKADLRLVYLALAHIIKYRGNFLIEGKLDTKNTSVDEVFKQFIKTYNQVFASDIEEGSLTRIEENNEVAKIFSEKLTKREKLDKILNLYPNEKSTDLFAQFISLIIGSKGNFKKFFNLTEKTDIECAKDSYEEDLEVLLARVGDEYAEIFVAAKNAYNAVVLSSIITVSNTETKAKLSASMIERFDKHDKDLKRMKAFFKVRLPENFNEVFNDVEKDGYAGYIEGKTKQEAFYKYMKKMLEHVEGADYFINQIEEENFLRKQRTFDNGAIPHQLHLEELEAILHQQAKYYPFLKVDYEKIKSLVTFRIPYFVGPLANGQSEFSWLTRKADGEIRPWNIEEKVDFGKSAIDFIEKMTNKDTYLPKENVLPKHSMCYQKYMVYNELTKIRYTDDQGKTHYFSGQEKQQIFNDLFKQKRKVKKKDLELFLYNMNHVESPTVEGVEDAFNSSFTTYHDLQKVGVPQEILDDPLNTEMLEEIIKILTVFEDKRMINERLQEFSNVLDEAVLKKLERRHYTGWGRLSAKLLIGIRDKESHLTILDYLMNDDKHNRNLMQLINDSNLSFKSIIEKEQVSTADKDIQSIVADLAGSPAIKKGILQSLKIVDELVGIMGYPPQTIVVEMARENQTTGKGKNNSKPRFTSLEKAIKELGSQILKEHPTDNQGLKNDRLYLYYLQNGKDMYTGQELDIHNLSNYDIDHVVPQSFITDNSIDNRVLASSAANREKGDNVPSLEVVRKRKVYWEKLYQAKLMSKRKFDYLTKAERGGLTEADKARFIHRQLVETRQITKNVANILHQRFNCKKDESGNVIEQVRIVTLKAALVSQFRKQFQLYKVREVNDYHHAHDAYLNCVVANTLLKVYPQLEPEFVYGDYHQFDWFKANKATAKKQFYTNIMLFFAKKDRIIDENGEILWDKKYLDTIKKVLNYRQMNIVKKTEIQKGEFSNATANPKGNSSKLIPRKADWDPIKYGGFDGSNMAYAIVIEHEKRKKKTVIKKELIQINIMERTAFEKDQKEFLEGKGYRNPKVITKIPKYTLYECENGRRRMLGSANEAQKGNQMVLPNHLMTLLYHAKNCEASDGKSLAYIESHREMFAELLDSISEFASRYTLADANLEKINTIFEQNKSGDVKVIAQSFVNLLEFNAMGAPASFKYFETNIERKRYNNLKELLNATIIYQSITGLYEARKRLDD

SEQ ID NO: 254 - protein, 1400 aa, synthetic construct
MAPKKKRKVGIHGVPAADKKYSIGLDIGTNSVGWAVITDEYKVPSKKFKVLGNTDRHSIKKNLIGALLFDSGETAEATRLKRTARRRYTRRKNRICYLQEIFSNEMAKVDDSFFHRLEESFLVEEDKKHERHPIFGNIVDEVAYHEKYPTIYHLRKKLVDSTDKADLRLIYLALAHMIKFRGHFLIEGDLNPDNSDVDKLFIQLVQTYNQLFEENPINASGVDAKAILSARLSKSRRLENLIAQLPGEKKNGLFGNLIALSLGLTPNFKSNFDLAEDAKLQLSKDTYDDDLDNLLAQIGDQYADLFLAAKNLSDAILLSDILRVNTEITKAPLSASMIKRYDEHHQDLTLLKALVRQQLPEKYKEIFFDQSKNGYAGYIDGGASQEEFYKFIKPILEKMDGTEELLVKLNREDLLRKQRTFDNGSIPHQIHLGELHAILRRQEDFYPFLKDNREKIEKILTFRIPYYVGPLARGNSRFAWMTRKSEETITPWNFEEVVDKGASAQSFIERMTNFDKNLPNEKVLPKHSLLYEYFTVYNELTKVKYVTEGMRKPAFLSGEQKKAIVDLLFKTNRKVTVKQLKEDYFKKIECFDSVEISGVEDRFNASLGTYHDLLKIIKDKDFLDNEENEDILEDIVLTLTLFEDREMIEERLKTYAHLFDDKVMKQLKRRRYTGWGRLSRKLINGIRDKQSGKTILDFLKSDGFANRNFMQLIHDDSLTFKEDIQKAQVSGQGDSLHEHIANLAGSPAIKKGILQTVKVVDELVKVMGRHKPENIVIEMARENQTTQKGQKNSRERMKRIEEGIKELGSQILKEHPVENTQLQNEKLYLYYLQNGRDMYVDQELDINRLSDYDVDHIVPQSFLKDDSIDNKVLTRSDKNRGKSDNVPSEEVVKKMKNYWRQLLNAKLITQRKFDNLTKAERGGLSELDKAGFIKRQLVETRQITKHVAQILDSRMNTKYDENDKLIREVKVITLKSKLVSDFRKDFQFYKVREINNYHHAHDAYLNAVVGTALIKKYPKLESEFVYGDYKVYDVRKMIAKSEQEIGKATAKYFFYSNIMNFFKTEITLANGEIRKRPLIETNGETGEIVWDKGRDFATVRKVLSMPQVNIVKKTEVQTGGFSKESILPKRNSDKLIARKKDWDPKKYGGFDSPTVAYSVLVVAKVEKGKSKKLKSVKELLGITIMERSSFEKNPIDFLEAKGYKEVKKDLIIKLPKYSLFELENGRKRMLASAGELQKGNELALPSKYVNFLYLASHYEKLKGSPEDNEQKQLFVEQHKHYLDEIIEQISEFSKRVILADANLDKVLSAYNKHRDKPIREQAENIIHLFTLTNLGAPAAFKYFDTTIDRKRYTSTKEVLDATLIHQSITGLYETRIDLSQLGGDKRPAATKKAGQAKKKK

SEQ ID NO: 255 - protein, 1333 aa, Roseburia hominis
MSQNIVDYCIGLDLGTGSVGWAVVDMNHRLMKRNGKHLWGSRLFSNAETAATRRSSRSIRRRYNKRRERIRLLRAILQDMVLEKDPTFFIRLEHTSFLDEEDKAKYLGTDYKDNYNLFIDEDFNDYTYYHKYPTIYHLRKALCESTEKADPRLIYLALHHIVKYRGNFLYEGQKFNMDASNIEDKLSDVFTQFADFNNIPYEDDEKKNLEILEILKKPLSKKAKVDEVMALISPEKEFKSAYKELVTGIAGNKMNVTKMILCESIKQGDSEIKLKFSDSNYDDQFSEVENDLGEYVEFIDSLHNIYSWVELQTIMGATHTDNASISEAMVSRYNKHHEDLQLLKKCIKDNVPKKYFDMFRNDSEKVKGYYNYINRPNKAPVDEFYKFVKKCIEKVDTPEAKQILHDIELENFLLKQNSRTNGSVPYQMQLDEMIKIIDNQAKYYPVLKEKREQLLSILTFRIPYYFGPLNETSEHAWIKRLEGKENQRILPWNYQDTVDVDATAEGFIKRMRSYCTYFPDEEVLPKNSLIVSKYEVYNELNKIRVDDKLLEVDVKNDIYNELFMKNKTVTEKKLKNWLVNNQCCRKDAEIKGFQKENQFSTSLTPWIDFTNIFGKIDQSNFDLIEKIIYDLTVFEDKKIMKRRLKKKYALPDDKIKQILKLKYKDWSRLSKKLLDGIVADNRFGSSVTVLDVLEMSRLNLMEIINDKELGYAQMIEEASSCPKDGKFTYEEVAKLAGSPALKRGIWQSLQIVEEITKVMKCRPKYIYIEFERSEEAKERTESKIKKLENVYKDLDEQTKKEYKSVLEELKGFDNTKKISSDSLFLYFTQLGKCMYSGKKLDIDSLDKYQIDHIVPQSLVKDDSFDNRVLVLPSENQRKLDDLVVPFDIRDKMYRFWKLLFDHELISPKKFYSLIKTEYTERDEERFINRQLVETRQITKNVTQIIEDHYSTTKVAAIRANLSHEFRVKNHIYKNRDINDYHHAHDAYIVALIGGFMRDRYPNMHDSKAVYSEYMKMFRKNKNDQKKWKDGFVINSMNYPYEVDGKLIWNPDLINEIKKCFYYKDCYCTTKLDQKSGQMFNLTVLPNDAHSAKGTTEAVIPVNKNRKDVNKYGGFSGLQYVIAAIEGTKKKGKKLVKVRKLSGIPLYLKQADIKEQIEYVEKEEKLSDVKIIKNNIPLNQLIEIDGRQYLLTSPTECVNAMQLVLNEEQCKLIADIYNAIYKQDFDGLDNMLMIQLYLQLIDKLKTLYPIYMGIVEKFEKLTEDFVSISKEEKANVIKQMLIIMHKGPQNGNIIYDDFNVGKRIGRLNGRTFYLDNIEFISQSPTGIYTKKYKL

SEQ ID NO: 256 - protein, 1335 aa, Sharpea azabuensis
MAKNKDIRYSIGLDIGTNSVGWAVMDEHYELLKKGNHHMWGSRLFDAAEPAATRRASRSIRRRYNKRRERIRLLRDLLGDMVMEVDPTFFIRLLNVSFLDEEDKQKNLGNDYKDNYNLFIEKDFNDKTYYDKYPTIYHLRKELCENKEKADPRLIYLALHHIVKYRGNFLYEGQSFTMDNSDIEERLNSAIEKFMSINEFDNRIVESDINSMIAVLSKIYQRSKKADDLLKIMNPTKEEKAAYKEFTKALVGLKFNISKMILAQEVKKGDTDIVLEFSNANYDSTIDELQSELGEYIEFIEMLHNIYSWVELQAILGATHTDNPSISAAMVERYEEHKKDLRVLKKVIREELPDKYNEVFRKDNRKLHNYLGYIKYPKDTPVEEFYKYIKGLLAKVDTDEAREILERIDLEKFMLKQNSRTNGSIPYQMQKDEMIQIIDNQSVYYPQLKENRDKLISILEFRIPYYFGPLNAHSEFAWIKKFEDKQKERILPWNYDQIVDIDATAEGFIERMKNTGTYFPDEPVMAKNSLTVSKFEVLNELNKIRINGKLIAVETKKELLSDLFMKNKTITDKKLKDWLVTHQYYDINEELKIEGYQKDLQFSTSLAPWIDFTKIFGEINASNYQLIEKIIYDISIFEDKKILKRRLKKVYQLDDLLVDKILKLNYTGWSRLSEKLLTGMTADNEFGSKATVLFVLENSNKNLMEIINDEKLGYKQIIEESNMQDIEGPFKYDEVKKLAGSPAIKRGIWQALLVVREITKFMKHEPSHIYIEFAREEQEKVRKESKIAKLQKIYENLNLQTKEDQQVYESLKKEDAKKRMETDALYLYYLQMGKSMYSGKPLDIDKLSTYQIDHILPQSLIKDDSFDNRVLVLPEENQWKLDSETVPFEIRNKMIGFWQMLHENGLMSNKKFFSLIRTDFSDKDKERFINRQLVETRQIIKNVAVIINDHYTNTNIVTVRAELSHQFRERYKIYKNRDINDFHHAHDAYIACIVGQFMHQNFEHLDAKIIYGQYKKNYKKDVKHHNNYGFILNSMNHLQSDIDTGEVMWDPAKIGKIKSCFYYKDVYVTKKLEQNSGTLFNVTVLPNDAHSEKGITAATVPLNKYRADVHKYGGFGNVQSIIVAIEGKKKKGKKLIDVRKLTSIPLHLKNAPVEEQLSYIASPEHEDLIDVRIVKEILKNQLIEIDGGLYYVTSPTEYVTARQLSLNEQSCKLISEIYAAMLKKRYEYLDEEEIFDLYLQLLQKMDTLYPAYKGIAKRFFDRAEDFKNIDVVEKCDVIKQILIIMHAGPMNGNIMYDDFKFTNRIGRFTHKNIDLNKTTFISTSVTGLFSKKYKL

SEQ ID NO: 257 - protein, 1417 aa, synthetic construct
MDYKDDDDKDYKDDDDKMAPKKKRKVGIHGVPAADKKYSIGLDIGTNSVGWAVITDEYKVPSKKFKVLGNTDRHSIKKNLIGALLFDSGETAEATRLKRTARRRYTRRKNRICYLQEIFSNEMAKVDDSFFHRLEESFLVEEDKKHERHPIFGNIVDEVAYHEKYPTIYHLRKKLVDSTDKADLRLIYLALAHMIKFRGHFLIEGDLNPDNSDVDKLFIQLVQTYNQLFEENPINASGVDAKAILSARLSKSRRLENLIAQLPGEKKNGLFGNLIALSLGLTPNFKSNFDLAEDAKLQLSKDTYDDDLDNLLAQIGDQYADLFLAAKNLSDAILLSDILRVNTEITKAPLSASMIKRYDEHHQDLTLLKALVRQQLPEKYKEIFFDQSKNGYAGYIDGGASQEEFYKFIKPILEKMDGTEELLVKLNREDLLRKQRTFDNGSIPHQIHLGELHAILRRQEDFYPFLKDNREKIEKILTFRIPYYVGPLARGNSRFAWMTRKSEETITPWNFEEVVDKGASAQSFIERMTNFDKNLPNEKVLPKHSLLYEYFTVYNELTKVKYVTEGMRKPAFLSGEQKKAIVDLLFKTNRKVTVKQLKEDYFKKIECFDSVEISGVEDRFNASLGTYHDLLKIIKDKDFLDNEENEDILEDIVLTLTLFEDREMIEERLKTYAHLFDDKVMKQLKRRRYTGWGRLSRKLINGIRDKQSGKTILDFLKSDGFANRNFMQLIHDDSLTFKEDIQKAQVSGQGDSLHEHIANLAGSPAIKKGILQTVKVVDELVKVMGRHKPENIVIEMARENQTTQKGQKNSRERMKRIEEGIKELGSQILKEHPVENTQLQNEKLYLYYLQNGRDMYVDQELDINRLSDYDVDHIVPQSFLKDDSIDNKVLTRSDKNRGKSDNVPSEEVVKKMKNYWRQLLNAKLITQRKFDNLTKAERGGLSELDKAGFIKRQLVETRQITKHVAQILDSRMNTKYDENDKLIREVKVITLKSKLVSDFRKDFQFYKVREINNYHHAHDAYLNAVVGTALIKKYPKLESEFVYGDYKVYDVRKMIAKSEQEIGKATAKYFFYSNIMNFFKTEITLANGEIRKRPLIETNGETGEIVWDKGRDFATVRKVLSMPQVNIVKKTEVQTGGFSKESILPKRNSDKLIARKKDWDPKKYGGFDSPTVAYSVLVVAKVEKGKSKKLKSVKELLGITIMERSSFEKNPIDFLEAKGYKEVKKDLIIKLPKYSLFELENGRKRMLASAGELQKGNELALPSKYVNFLYLASHYEKLKGSPEDNEQKQLFVEQHKHYLDEIIEQISEFSKRVILADANLDKVLSAYNKHRDKPIREQAENIIHLFTLTNLGAPAAFKYFDTTIDRKRYTSTKEVLDATLIHQSITGLYETRIDLSQLGGDKRPAATKKAGQAKKKK

SEQ ID NO: 258 - protein, 1368 aa, synthetic construct; identical to SEQ ID NO: 6

SEQ ID NO: 259 - protein, 1376 aa, synthetic construct
MDKKYSIGLDIGTNSVGWAVITDEYKVPSKKFKVLGNTDRHSIKKNLIGALLFDSGETAEATRLKRTARRRYTRRKNRICYLQEIFSNEMAKVDDSFFHRLEESFLVEEDKKHERHPIFGNIVDEVAYHEKYPTIYHLRKKLVDSTDKADLRLIYLALAHMIKFRGHFLIEGDLNPDNSDVDKLFIQLVQTYNQLFEENPINASGVDAKAILSARLSKSRRLENLIAQLPGEKKNGLFGNLIALSLGLTPNFKSNFDLAEDAKLQLSKDTYDDDLDNLLAQIGDQYADLFLAAKNLSDAILLSDILRVNTEITKAPLSASMIKRYDEHHQDLTLLKALVRQQLPEKYKEIFFDQSKNGYAGYIDGGASQEEFYKFIKPILEKMDGTEELLVKLNREDLLRKQRTFDNGSIPHQIHLGELHAILRRQEDFYPFLKDNREKIEKILTFRIPYYVGPLARGNSRFAWMTRKSEETITPWNFEEVVDKGASAQSFIERMTNFDKNLPNEKVLPKHSLLYEYFTVYNELTKVKYVTEGMRKPAFLSGEQKKAIVDLLFKTNRKVTVKQLKEDYFKKIECFDSVEISGVEDRFNASLGTYHDLLKIIKDKDFLDNEENEDILEDIVLTLTLFEDREMIEERLKTYAHLFDDKVMKQLKRRRYTGWGRLSRKLINGIRDKQSGKTILDFLKSDGFANRNFMQLIHDDSLTFKEDIQKAQVSGQGDSLHEHIANLAGSPAIKKGILQTVKVVDELVKVMGRHKPENIVIEMARENQTTQKGQKNSRERMKRIEEGIKELGSQILKEHPVENTQLQNEKLYLYYLQNGRDMYVDQELDINRLSDYDVDHIVPQSFLKDDSIDNKVLTRSDKNRGKSDNVPSEEVVKKMKNYWRQLLNAKLITQRKFDNLTKAERGGLSELDKAGFIKRQLVETRQITKHVAQILDSRMNTKYDENDKLIREVKVITLKSKLVSDFRKDFQFYKVREINNYHHAHDAYLNAVVGTALIKKYPKLESEFVYGDYKVYDVRKMIAKSEQEIGKATAKYFFYSNIMNFFKTEITLANGEIRKRPLIETNGETGEIVWDKGRDFATVRKVLSMPQVNIVKKTEVQTGGFSKESILPKRNSDKLIARKKDWDPKKYGGFDSPTVAYSVLVVAKVEKGKSKKLKSVKELLGITIMERSSFEKNPIDFLEAKGYKEVKKDLIIKLPKYSLFELENGRKRMLASAGELQKGNELALPSKYVNFLYLASHYEKLKGSPEDNEQKQLFVEQHKHYLDEIIEQISEFSKRVILADANLDKVLSAYNKHRDKPIREQAENIIHLFTLTNLGAPAAFKYFDTTIDRKRYTSTKEVLDATLIHQSITGLYETRIDLSQLGGDPPKKKRKV

SEQ ID NO: 260 - protein, 1372 aa, synthetic construct
GAASMDKKYSIGLAIGTNSVGWAVITDEYKVPSKKFKVLGNTDRHSIKKNLIGALLFDSGETAEATRLKRTARRRYTRRKNRICYLQEIFSNEMAKVDDSFFHRLEESFLVEEDKKHERHPIFGNIVDEVAYHEKYPTIYHLRKKLVDSTDKADLRLIYLALAHMIKFRGHFLIEGDLNPDNSDVDKLFIQLVQTYNQLFEENPINASGVDAKAILSARLSKSRRLENLIAQLPGEKKNGLFGNLIALSLGLTPNFKSNFDLAEDAKLQLSKDTYDDDLDNLLAQIGDQYADLFLAAKNLSDAILLSDILRVNTEITKAPLSASMIKRYDEHHQDLTLLKALVRQQLPEKYKEIFFDQSKNGYAGYIDGGASQEEFYKFIKPILEKMDGTEELLVKLNREDLLRKQRTFDNGSIPHQIHLGELHAILRRQEDFYPFLKDNREKIEKILTFRIPYYVGPLARGNSRFAWMTRKSEETITPWNFEEVVDKGASAQSFIERMTNFDKNLPNEKVLPKHSLLYEYFTVYNELTKVKYVTEGMRKPAFLSGEQKKAIVDLLFKTNRKVTVKQLKEDYFKKIECFDSVEISGVEDRFNASLGTYHDLLKIIKDKDFLDNEENEDILEDIVLTLTLFEDREMIEERLKTYAHLFDDKVMKQLKRRRYTGWGRLSRKLINGIRDKQSGKTILDFLKSDGFANRNFMQLIHDDSLTFKEDIQKAQVSGQGDSLHEHIANLAGSPAIKKGILQTVKVVDELVKVMGRHKPENIVIEMARENQTTQKGQKNSRERMKRIEEGIKELGSQILKEHPVENTQLQNEKLYLYYLQNGRDMYVDQELDINRLSDYDVDAIVPQSFLKDDSIDNKVLTRSDKNRGKSDNVPSEEVVKKMKNYWRQLLNAKLITQRKFDNLTKAERGGLSELDKAGFIKRQLVETRQITKHVAQILDSRMNTKYDENDKLIREVKVITLKSKLVSDFRKDFQFYKVREINNYHHAHDAYLNAVVGTALIKKYPKLESEFVYGDYKVYDVRKMIAKSEQEIGKATAKYFFYSNIMNFFKTEITLANGEIRKRPLIETNGETGEIVWDKGRDFATVRKVLSMPQVNIVKKTEVQTGGFSKESILPKRNSDKLIARKKDWDPKKYGGFDSPTVAYSVLVVAKVEKGKSKKLKSVKELLGITIMERSSFEKNPIDFLEAKGYKEVKKDLIIKLPKYSLFELENGRKRMLASAGELQKGNELALPSKYVNFLYLASHYEKLKGSPEDNEQKQLFVEQHKHYLDEIIEQISEFSKRVILADANLDKVLSAYNKHRDKPIREQAENIIHLFTLTNLGAPAAFKYFDTTIDRKRYTSTKEVLDATLIHQSITGLYETRIDLSQLGGD

SEQ ID NO: 261 - protein, 1367 aa, Streptococcus pyogenes
DKKYSIGLDIGTNSVGWAVITDEYKVPSKKFKVLGNTDRHSIKKNLIGALLFDSGETAEATRLKRTARRRYTRRKNRICYLQEIFSNEMAKVDDSFFHRLEESFLVEEDKKHERHPIFGNIVDEVAYHEKYPTIYHLRKKLVDSTDKADLRLIYLALAHMIKFRGHFLIEGDLNPDNSDVDKLFIQLVQTYNQLFEENPINASGVDAKAILSARLSKSRRLENLIAQLPGEKKNGLFGNLIALSLGLTPNFKSNFDLAEDAKLQLSKDTYDDDLDNLLAQIGDQYADLFLAAKNLSDAILLSDILRVNTEITKAPLSASMIKRYDEHHQDLTLLKALVRQQLPEKYKEIFFDQSKNGYAGYIDGGASQEEFYKFIKPILEKMDGTEELLVKLNREDLLRKQRTFDNGSIPHQIHLGELHAILRRQEDFYPFLKDNREKIEKILTFRIPYYVGPLARGNSRFAWMTRKSEETITPWNFEEVVDKGASAQSFIERMTNFDKNLPNEKVLPKHSLLYEYFTVYNELTKVKYVTEGMRKPAFLSGEQKKAIVDLLFKTNRKVTVKQLKEDYFKKIECFDSVEISGVEDRFNASLGTYHDLLKIIKDKDFLDNEENEDILEDIVLTLTLFEDREMIEERLKTYAHLFDDKVMKQLKRRRYTGWGRLSRKLINGIRDKQSGKTILDFLKSDGFANRNFMQLIHDDSLTFKEDIQKAQVSGQGDSLHEHIANLAGSPAIKKGILQTVKVVDELVKVMGRHKPENIVIEMARENQTTQKGQKNSRERMKRIEEGIKELGSQILKEHPVENTQLQNEKLYLYYLQNGRDMYVDQELDINRLSDYDVDHIVPQSFLKDDSIDNKVLTRSDKNRGKSDNVPSEEVVKKMKNYWRQLLNAKLITQRKFDNLTKAERGGLSELDKAGFIKRQLVETRQITKHVAQILDSRMNTKYDENDKLIREVKVITLKSKLVSDFRKDFQFYKVREINNYHHAHDAYLNAVVGTALIKKYPKLESEFVYGDYKVYDVRKMIAKSEQEIGKATAKYFFYSNIMNFFKTEITLANGEIRKRPLIETNGETGEIVWDKGRDFATVRKVLSMPQVNIVKKTEVQTGGFSKESILPKRNSDKLIARKKDWDPKKYGGFDSPTVAYSVLVVAKVEKGKSKKLKSVKELLGITIMERSSFEKNPIDFLEAKGYKEVKKDLIIKLPKYSLFELENGRKRMLASAGELQKGNELALPSKYVNFLYLASHYEKLKGSPEDNEQKQLFVEQHKHYLDEIIEQISEFSKRVILADANLDKVLSAYNKHRDKPIREQAENIIHLFTLTNLGAPAAFKYFDTTIDRKRYTSTKEVLDATLIHQSITGLYETRIDLSQLGGD

SEQ ID NO: 262 - protein, 1367 aa, Streptococcus pyogenes
DKKYSIGLAIGTNSVGWAVITDEYKVPSKKFKVLGNTDRHSIKKNLIGALLFDSGETAEATRLKRTARRRYTRRKNRICYLQEIFSNEMAKVDDSFFHRLEESFLVEEDKKHERHPIFGNIVDEVAYHEKYPTIYHLRKKLVDSTDKADLRLIYLALAHMIKFRGHFLIEGDLNPDNSDVDKLFIQLVQTYNQLFEENPINASGVDAKAILSARLSKSRRLENLIAQLPGEKKNGLFGNLIALSLGLTPNFKSNFDLAEDAKLQLSKDTYDDDLDNLLAQIGDQYADLFLAAKNLSDAILLSDILRVNTEITKAPLSASMIKRYDEHHQDLTLLKALVRQQLPEKYKEIFFDQSKNGYAGYIDGGASQEEFYKFIKPILEKMDGTEELLVKLNREDLLRKQRTFDNGSIPHQIHLGELHAILRRQEDFYPFLKDNREKIEKILTFRIPYYVGPLARGNSRFAWMTRKSEETITPWNFEEVVDKGASAQSFIERMTNFDKNLPNEKVLPKHSLLYEYFTVYNELTKVKYVTEGMRKPAFLSGEQKKAIVDLLFKTNRKVTVKQLKEDYFKKIECFDSVEISGVEDRFNASLGTYHDLLKIIKDKDFLDNEENEDILEDIVLTLTLFEDREMIEERLKTYAHLFDDKVMKQLKRRRYTGWGRLSRKLINGIRDKQSGKTILDFLKSDGFANRNFMQLIHDDSLTFKEDIQKAQVSGQGDSLHEHIANLAGSPAIKKGILQTVKVVDELVKVMGRHKPENIVIEMARENQTTQKGQKNSRERMKRIEEGIKELGSQILKEHPVENTQLQNEKLYLYYLQNGRDMYVDQELDINRLSDYDVDHIVPQSFLKDDSIDNKVLTRSDKNRGKSDNVPSEEVVKKMKNYWRQLLNAKLITQRKFDNLTKAERGGLSELDKAGFIKRQLVETRQITKHVAQILDSRMNTKYDENDKLIREVKVITLKSKLVSDFRKDFQFYKVREINNYHHAHDAYLNAVVGTALIKKYPKLESEFVYGDYKVYDVRKMIAKSEQEIGKATAKYFFYSNIMNFFKTEITLANGEIRKRPLIETNGETGEIVWDKGRDFATVRKVLSMPQVNIVKKTEVQTGGFSKESILPKRNSDKLIARKKDWDPKKYGGFDSPTVAYSVLVVAKVEKGKSKKLKSVKELLGITIMERSSFEKNPIDFLEAKGYKEVKKDLIIKLPKYSLFELENGRKRMLASAGELQKGNELALPSKYVNFLYLASHYEKLKGSPEDNEQKQLFVEQHKHYLDEIIEQISEFSKRVILADANLDKVLSAYNKHRDKPIREQAENIIHLFTLTNLGAPAAFKYFDTTIDRKRYTSTKEVLDATLIHQSITGLYETRIDLSQLGGD

SEQ ID NO: 263 - protein, 1367 aa, synthetic construct
DKKYSIGLAIGTNSVGWAVITDEYKVPSKKFKVLGNTDRHSIKKNLIGALLFDSGETAEATRLKRTARRRYTRRKNRICYLQEIFSNEMAKVDDSFFHRLEESFLVEEDKKHERHPIFGNIVDEVAYHEKYPTIYHLRKKLVDSTDKADLRLIYLALAHMIKFRGHFLIEGDLNPDNSDVDKLFIQLVQTYNQLFEENPINASGVDAKAILSARLSKSRRLENLIAQLPGEKKNGLFGNLIALSLGLTPNFKSNFDLAEDAKLQLSKDTYDDDLDNLLAQIGDQYADLFLAAKNLSDAILLSDILRVNTEITKAPLSASMIKRYDEHHQDLTLLKALVRQQLPEKYKEIFFDQSKNGYAGYIDGGASQEEFYKFIKPILEKMDGTEELLVKLNREDLLRKQRTFDNGSIPHQIHLGELHAILRRQEDFYPFLKDNREKIEKILTFRIPYYVGPLARGNSRFAWMTRKSEETITPWNFEEVVDKGASAQSFIERMTNFDKNLPNEKVLPKHSLLYEYFTVYNELTKVKYVTEGMRKPAFLSGEQKKAIVDLLFKTNRKVTVKQLKEDYFKKIECFDSVEISGVEDRFNASLGTYHDLLKIIKDKDFLDNEENEDILEDIVLTLTLFEDREMIEERLKTYAHLFDDKVMKQLKRRRYTGWGRLSRKLINGIRDKQSGKTILDFLKSDGFANRNFMQLIHDDSLTFKEDIQKAQVSGQGDSLHEHIANLAGSPAIKKGILQTVKVVDELVKVMGRHKPENIVIEMARENQTTQKGQKNSRERMKRIEEGIKELGSQILKEHPVENTQLQNEKLYLYYLQNGRDMYVDQELDINRLSDYDVDHIVPQSFLKDDSIDNKVLTRSDKNRGKSDNVPSEEVVKKMKNYWRQLLNAKLITQRKFDNLTKAERGGLSELDKAGFIKRQLVETRQITKHVAQILDSRMNTKYDENDKLIREVKVITLKSKLVSDFRKDFQFYKVREINNYHHAHDAYLNAVVGTALIKKYPKLESEFVYGDYKVYDVRKMIAKSEQEIGKATAKYFFYSNIMNFFKTEITLANGEIRKRPLIETNGETGEIVWDKGRDFATVRKVLSMPQVNIVKKTEVQTGGFSKESILPKRNSDKLIARKKDWDPKKYGGFESPTVAYSVLVVAKVEKGKSKKLKSVKELLGITIMERSSFEKNPIDFLEAKGYKEVKKDLIIKLPKYSLFELENGRKRMLASAGELQKGNELALPSKYVNFLYLASHYEKLKGSPEDNEQKQLFVEQHKHYLDEIIEQISEFSKRVILADANLDKVLSAYNKHRDKPIREQAENIIHLFTLTNLGAPAAFKYFDTTIDRKQYRSTKEVLDATLIHQSITGLYETRIDLSQLGGD

SEQ ID NO: 264 - protein, 1367 aa, synthetic construct
DKKYSIGLAIGTNSVGWAVITDEYKVPSKKFKVLGNTDRHSIKKNLIGALLFDSGETAEATRLKRTARRRYTRRKNRICYLQEIFSNEMAKVDDSFFHRLEESFLVEEDKKHERHPIFGNIVDEVAYHEKYPTIYHLRKKLVDSTDKADLRLIYLALAHMIKFRGHFLIEGDLNPDNSDVDKLFIQLVQTYNQLFEENPINASGVDAKAILSARLSKSRRLENLIAQLPGEKKNGLFGNLIALSLGLTPNFKSNFDLAEDAKLQLSKDTYDDDLDNLLAQIGDQYADLFLAAKNLSDAILLSDILRVNTEITKAPLSASMIKRYDEHHQDLTLLKALVRQQLPEKYKEIFFDQSKNGYAGYIDGGASQEEFYKFIKPILEKMDGTEELLVKLNREDLLRKQRTFDNGSIPHQIHLGELHAILRRQEDFYPFLKDNREKIEKILTFRIPYYVGPLARGNSRFAWMTRKSEETITPWNFEEVVDKGASAQSFIERMTNFDKNLPNEKVLPKHSLLYEYFTVYNELTKVKYVTEGMRKPAFLSGEQKKAIVDLLFKTNRKVTVKQLKEDYFKKIECFDSVEISGVEDRFNASLGTYHDLLKIIKDKDFLDNEENEDILEDIVLTLTLFEDREMIEERLKTYAHLFDDKVMKQLKRRRYTGWGRLSRKLINGIRDKQSGKTILDFLKSDGFANRNFMQLIHDDSLTFKEDIQKAQVSGQGDSLHEHIANLAGSPAIKKGILQTVKVVDELVKVMGRHKPENIVIEMARENQTTQKGQKNSRERMKRIEEGIKELGSQILKEHPVENTQLQNEKLYLYYLQNGRDMYVDQELDINRLSDYDVDHIVPQSFLKDDSIDNKVLTRSDKNRGKSDNVPSEEVVKKMKNYWRQLLNAKLITQRKFDNLTKAERGGLSELDKAGFIKRQLVETRQITKHVAQILDSRMNTKYDENDKLIREVKVITLKSKLVSDFRKDFQFYKVREINNYHHAHDAYLNAVVGTALIKKYPKLESEFVYGDYKVYDVRKMIAKSEQEIGKATAKYFFYSNIMNFFKTEITLANGEIRKRPLIETNGETGEIVWDKGRDFATVRKVLSMPQVNIVKKTEVQTGGFSKESILPKRNSDKLIARKKDWDPKKYGGFVSPTVAYSVLVVAKVEKGKSKKLKSVKELLGITIMERSSFEKNPIDFLEAKGYKEVKKDLIIKLPKYSLFELENGRKRMLASAGELQKGNELALPSKYVNFLYLASHYEKLKGSPEDNEQKQLFVEQHKHYLDEIIEQISEFSKRVILADANLDKVLSAYNKHRDKPIREQAENIIHLFTLTNLGAPAAFKYFDTTIDRKQYRSTKEVLDATLIHQSITGLYETRIDLSQLGGD

SEQ ID NO: 265 - protein, 1367 aa, synthetic construct
DKKYSIGLAIGTNSVGWAVITDEYKVPSKKFKVLGNTDRHSIKKNLIGALLFDSGETAEATRLKRTARRRYTRRKNRICYLQEIFSNEMAKVDDSFFHRLEESFLVEEDKKHERHPIFGNIVDEVAYHEKYPTIYHLRKKLVDSTDKADLRLIYLALAHMIKFRGHFLIEGDLNPDNSDVDKLFIQLVQTYNQLFEENPINASGVDAKAILSARLSKSRRLENLIAQLPGEKKNGLFGNLIALSLGLTPNFKSNFDLAEDAKLQLSKDTYDDDLDNLLAQIGDQYADLFLAAKNLSDAILLSDILRVNTEITKAPLSASMIKRYDEHHQDLTLLKALVRQQLPEKYKEIFFDQSKNGYAGYIDGGASQEEFYKFIKPILEKMDGTEELLVKLNREDLLRKQRTFDNGSIPHQIHLGELHAILRRQEDFYPFLKDNREKIEKILTFRIPYYVGPLARGNSRFAWMTRKSEETITPWNFEEVVDKGASAQSFIERMTNFDKNLPNEKVLPKHSLLYEYFTVYNELTKVKYVTEGMRKPAFLSGEQKKAIVDLLFKTNRKVTVKQLKEDYFKKIECFDSVEISGVEDRFNASLGTYHDLLKIIKDKDFLDNEENEDILEDIVLTLTLFEDREMIEERLKTYAHLFDDKVMKQLKRRRYTGWGRLSRKLINGIRDKQSGKTILDFLKSDGFANRNFMQLIHDDSLTFKEDIQKAQVSGQGDSLHEHIANLAGSPAIKKGILQTVKVVDELVKVMGRHKPENIVIEMARENQTTQKGQKNSRERMKRIEEGIKELGSQILKEHPVENTQLQNEKLYLYYLQNGRDMYVDQELDINRLSDYDVDHIVPQSFLKDDSIDNKVLTRSDKNRGKSDNVPSEEVVKKMKNYWRQLLNAKLITQRKFDNLTKAERGGLSELDKAGFIKRQLVETRQITKHVAQILDSRMNTKYDENDKLIREVKVITLKSKLVSDFRKDFQFYKVREINNYHHAHDAYLNAVVGTALIKKYPKLESEFVYGDYKVYDVRKMIAKSEQEIGKATAKYFFYSNIMNFFKTEITLANGEIRKRPLIETNGETGEIVWDKGRDFATVRKVLSMPQVNIVKKTEVQTGGFSKESILPKRNSDKLIARKKDWDPKKYGGFVSPTVAYSVLVVAKVEKGKSKKLKSVKELLGITIMERSSFEKNPIDFLEAKGYKEVKKDLIIKLPKYSLFELENGRKRMLASARELQKGNELALPSKYVNFLYLASHYEKLKGSPEDNEQKQLFVEQHKHYLDEIIEQISEFSKRVILADANLDKVLSAYNKHRDKPIREQAENIIHLFTLTNLGAPAAFKYFDTTIDRKEYRSTKEVLDATLIHQSITGLYETRIDLSQLGGD

SEQ ID NO: 266 - protein, 1052 aa, Staphylococcus aureus
KRNYILGLDIGITSVGYGIIDYETRDVIDAGVRLFKEANVENNEGRRSKRGARRLKRRRRHRIQRVKKLLFDYNLLTDHSELSGINPYEARVKGLSQKLSEEEFSAALLHLAKRRGVHNVNEVEEDTGNELSTKEQISRNSKALEEKYVAELQLERLKKDGEVRGSINRFKTSDYVKEAKQLLKVQKAYHQLDQSFIDTYIDLLETRRTYYEGPGEGSPFGWKDIKEWYEMLMGHCTYFPEELRSVKYAYNADLYNALNDLNNLVITRDENEKLEYYEKFQIIENVFKQKKKPTLKQIAKEILVNEEDIKGYRVTSTGKPEFTNLKVYHDIKDITARKEIIENAELLDQIAKILTIYQSSEDIQEELTNLNSELTQEEIEQISNLKGYTGTHNLSLKAINLILDELWHTNDNQIAIFNRLKLVPKKVDLSQQKEIPTTLVDDFILSPVVKRSFIQSIKVINAIIKKYGLPNDIIIELAREKNSKDAQKMINEMQKRNRQTNERIEEIIRTTGKENAKYLIEKIKLHDMQEGKCLYSLEAIPLEDLLNNPFNYEVDHIIPRSVSFDNSFNNKVLVKQEENSKKGNRTPFQYLSSSDSKISYETFKKHILNLAKGKGRISKTKKEYLLEERDINRFSVQKDFINRNLVDTRYATRGLMNLLRSYFRVNNLDVKVKSINGGFTSFLRRKWKFKKERNKGYKHHAEDALIIANADFIFKEWKKLDKAKKVMENQMFEEKQAESMPEIETEQEYKEIFITPHQIKHIKDFKDYKYSHRVDKKPNRELINDTLYSTRKDDKGNTLIVNNLNGLYDKDNDKLKKLINKSPEKLLMYHHDPQTYQKLKLIMEQYGDEKNPLYKYYEETGNYLTKYSKKDNGPVIKKIKYYGNKLNAHLDITDDYPNSRNKVVKLSLKPYRFDVYLDNGVYKFVTVKNLDVIKKENYYEVNSKCYEEAKKLKKISNQAEFIASFYNNDLIKINGELYRVIGVNNDLLNRIEVNMIDITYREYLENMNDKRPPRIIKTIASKTQSIKKYSTDILGNLYEVKSKKHPQIIKKG

SEQ ID NO: 267 - protein, 1052 aa, synthetic construct
KRNYILGLDIGITSVGYGIIDYETRDVIDAGVRLFKEANVENNEGRRSKRGARRLKRRRRHRIQRVKKLLFDYNLLTDHSELSGINPYEARVKGLSQKLSEEEFSAALLHLAKRRGVHNVNEVEEDTGNELSTKEQISRNSKALEEKYVAELQLERLKKDGEVRGSINRFKTSDYVKEAKQLLKVQKAYHQLDQSFIDTYIDLLETRRTYYEGPGEGSPFGWKDIKEWYEMLMGHCTYFPEELRSVKYAYNADLYNALNDLNNLVITRDENEKLEYYEKFQIIENVFKQKKKPTLKQIAKEILVNEEDIKGYRVTSTGKPEFTNLKVYHDIKDITARKEIIENAELLDQIAKILTIYQSSEDIQEELTNLNSELTQEEIEQISNLKGYTGTHNLSLKAINLILDELWHTNDNQIAIFNRLKLVPKKVDLSQQKEIPTTLVDDFILSPVVKRSFIQSIKVINAIIKKYGLPNDIIIELAREKNSKDAQKMINEMQKRNRQTNERIEEIIRTTGKENAKYLIEKIKLHDMQEGKCLYSLEAIPLEDLLNNPFNYEVDHIIPRSVSFDNSFNNKVLVKQEEASKKGNRTPFQYLSSSDSKISYETFKKHILNLAKGKGRISKTKKEYLLEERDINRFSVQKDFINRNLVDTRYATRGLMNLLRSYFRVNNLDVKVKSINGGFTSFLRRKWKFKKERNKGYKHHAEDALIIANADFIFKEWKKLDKAKKVMENQMFEEKQAESMPEIETEQEYKEIFITPHQIKHIKDFKDYKYSHRVDKKPNRELINDTLYSTRKDDKGNTLIVNNLNGLYDKDNDKLKKLINKSPEKLLMYHHDPQTYQKLKLIMEQYGDEKNPLYKYYEETGNYLTKYSKKDNGPVIKKIKYYGNKLNAHLDITDDYPNSRNKVVKLSLKPYRFDVYLDNGVYKFVTVKNLDVIKKENYYEVNSKCYEEAKKLKKISNQAEFIASFYNNDLIKINGELYRVIGVNNDLLNRIEVNMIDITYREYLENMNDKRPPRIIKTIASKTQSIKKYSTDILGNLYEVKSKKHPQIIKKG

SEQ ID NO: 268 - protein, 1052 aa, synthetic construct
KRNYILGLDIGITSVGYGIIDYETRDVIDAGVRLFKEANVENNEGRRSKRGARRLKRRRRHRIQRVKKLLFDYNLLTDHSELSGINPYEARVKGLSQKLSEEEFSAALLHLAKRRGVHNVNEVEEDTGNELSTKEQISRNSKALEEKYVAELQLERLKKDGEVRGSINRFKTSDYVKEAKQLLKVQKAYHQLDQSFIDTYIDLLETRRTYYEGPGEGSPFGWKDIKEWYEMLMGHCTYFPEELRSVKYAYNADLYNALNDLNNLVITRDENEKLEYYEKFQIIENVFKQKKKPTLKQIAKEILVNEEDIKGYRVTSTGKPEFTNLKVYHDIKDITARKEIIENAELLDQIAKILTIYQSSEDIQEELTNLNSELTQEEIEQISNLKGYTGTHNLSLKAINLILDELWHTNDNQIAIFNRLKLVPKKVDLSQQKEIPTTLVDDFILSPVVKRSFIQSIKVINAIIKKYGLPNDIIIELAREKNSKDAQKMINEMQKRNRQTNERIEEIIRTTGKENAKYLIEKIKLHDMQEGKCLYSLEAIPLEDLLNNPFNYEVDHIIPRSVSFDNSFNNKVLVKQEEASKKGNRTPFQYLSSSDSKISYETFKKHILNLAKGKGRISKTKKEYLLEERDINRFSVQKDFINRNLVDTRYATRGLMNLLRSYFRVNNLDVKVKSINGGFTSFLRRKWKFKKERNKGYKHHAEDALIIANADFIFKEWKKLDKAKKVMENQMFEEKQAESMPEIETEQEYKEIFITPHQIKHIKDFKDYKYSHRVDKKPNRKLINDTLYSTRKDDKGNTLIVNNLNGLYDKDNDKLKKLINKSPEKLLMYHHDPQTYQKLKLIMEQYGDEKNPLYKYYEETGNYLTKYSKKDNGPVIKKIKYYGNKLNAHLDITDDYPNSRNKVVKLSLKPYRFDVYLDNGVYKFVTVKNLDVIKKENYYEVNSKCYEEAKKLKKISNQAEFIASFYKNDLIKINGELYRVIGVNNDLLNRIEVNMIDITYREYLENMNDKRPPHIIKTIASKTQSIKKYSTDILGNLYEVKSKKHPQIIKKG

SEQ ID NO: 269-299 - skipped (31 entries)

SEQ ID NO: 300 - protein, 120 aa, synthetic construct
  VARIANT 5..120: note = GGGS repeats may be deleted
GGGSGGGSGGGSGGGSGGGSGGGSGGGSGGGSGGGSGGGSGGGSGGGSGGGSGGGSGGGSGGGSGGGSGGGSGGGSGGGSGGGSGGGSGGGSGGGSGGGSGGGSGGGSGGGSGGGSGGGS

SEQ ID NO: 301 - protein, 150 aa, synthetic construct
  VARIANT 6..150: note = GGGGS repeats may be deleted
GGGGSGGGGSGGGGSGGGGSGGGGSGGGGSGGGGSGGGGSGGGGSGGGGSGGGGSGGGGSGGGGSGGGGSGGGGSGGGGSGGGGSGGGGSGGGGSGGGGSGGGGSGGGGSGGGGSGGGGSGGGGSGGGGSGGGGSGGGGSGGGGSGGGGS

SEQ ID NO: 302 - protein, 30 aa, synthetic construct
  VARIANT 2..30: note = Residues may be deleted
GGGGGGGGGGGGGGGGGGGGGGGGGGGGGG

SEQ ID NO: 303 - protein, 150 aa, synthetic construct
  VARIANT 6..150: note = EAAAK repeats may be deleted
EAAAKEAAAKEAAAKEAAAKEAAAKEAAAKEAAAKEAAAKEAAAKEAAAKEAAAKEAAAKEAAAKEAAAKEAAAKEAAAKEAAAKEAAAKEAAAKEAAAKEAAAKEAAAKEAAAKEAAAKEAAAKEAAAKEAAAKEAAAKEAAAKEAAAK

SEQ ID NO: 304 - protein, 90 aa, synthetic construct
  VARIANT 4..90: note = GGS repeats may be deleted
GGSGGSGGSGGSGGSGGSGGSGGSGGSGGSGGSGGSGGSGGSGGSGGSGGSGGSGGSGGSGGSGGSGGSGGSGGSGGSGGSGGSGGSGGS

SEQ ID NO: 305 - protein, 120 aa, synthetic construct
  VARIANT 5..120: note = SGGS repeats may be deleted
SGGSSGGSSGGSSGGSSGGSSGGSSGGSSGGSSGGSSGGSSGGSSGGSSGGSSGGSSGGSSGGSSGGSSGGSSGGSSGGSSGGSSGGSSGGSSGGSSGGSSGGSSGGSSGGSSGGSSGGS

SEQ ID NO: 306 - protein, 16 aa, synthetic construct
SGSETPGTSESATPES

SEQ ID NO: 307 - protein, 94 aa, synthetic construct
  VARIANT 8..94: note = GGS repeats may be deleted
SGGSGGSGGSGGSGGSGGSGGSGGSGGSGGSGGSGGSGGSGGSGGSGGSGGSGGSGGSGGSGGSGGSGGSGGSGGSGGSGGSGGSGGSGGSGGS

SEQ ID NO: 308 - protein, 32 aa, synthetic construct
SGGSSGGSSGSETPGTSESATPESSGGSSGGS

SEQ ID NO: 309 - protein, 4 aa, synthetic construct
SGGS

SEQ ID NO: 310 - protein, 256 aa, synthetic construct
  VARIANT 5..120: note = SGGS repeats may be deleted
  VARIANT 141..256: note = SGGS repeats may be deleted
SGGSSGGSSGGSSGGSSGGSSGGSSGGSSGGSSGGSSGGSSGGSSGGSSGGSSGGSSGGSSGGSSGGSSGGSSGGSSGGSSGGSSGGSSGGSSGGSSGGSSGGSSGGSSGGSSGGSSGGSSGSETPGTSESATPESSGGSSGGSSGGSSGGSSGGSSGGSSGGSSGGSSGGSSGGSSGGSSGGSSGGSSGGSSGGSSGGSSGGSSGGSSGGSSGGSSGGSSGGSSGGSSGGSSGGSSGGSSGGSSGGSSGGSSGGS

SEQ ID NO: 311 - protein, 9 aa, synthetic construct
GGSGGSGGS

SEQ ID NO: 312 - protein, 21 aa, synthetic construct
GGSGGSGGSGGSGGSGGSGGS

SEQ ID NO: 313 - protein, 5 aa, synthetic construct
GGGGS

SEQ ID NO: 314 - protein, 104 aa, synthetic construct
GGSGGSPGSPAGSPTSTEEGTSESATPESGPGTSTEPSEGSAPGSPAGSPTSTEEGTSTEPSEGSAPGTSTEPSEGSAPGTSESATPESGPGSEPATSGGSGGS

SEQ ID NO: 315 - protein, 24 aa, synthetic construct
SGGSSGGSSGSETPGTSESATPES

SEQ ID NO: 316 - protein, 40 aa, synthetic construct
SGGSSGGSSGSETPGTSESATPESSGGSSGGSSGGSSGGS

SEQ ID NO: 317 - protein, 64 aa, synthetic construct
SGGSSGGSSGSETPGTSESATPESSGGSSGGSSGGSSGGSSGSETPGTSESATPESSGGSSGGS

SEQ ID NO: 318 - protein, 92 aa, synthetic construct
PGSPAGSPTSTEEGTSESATPESGPGTSTEPSEGSAPGSPAGSPTSTEEGTSTEPSEGSAPGTSTEPSEGSAPGTSESATPESGPGSEPATS

SEQ ID NO: 319-349 - skipped (31 entries)

SEQ ID NO: 350 - protein, 198 aa, Homo sapiens [sequence omitted]

SEQ ID NO: 351 - protein, 198 aa, Mus sp.
MDSLLMKQKKFLYHFKNVRWAKGRHETYLCYVVKRRDSATSCSLDFGHLRNKSGCHVELLFLRYISDWDLDPGRCYRVTWFTSWSPCYDCARHVAEFLRWNPNLSLRIFTARLYFCEDRKAEPEGLRRLHRAGVQIGIMTFKDYFYCWNTFVENRERTFKAWEGLHENSVRLTRQLRRILLPLYEVDDLRDAFRMLGF

SEQ ID NO: 352 - protein, 198 aa, Canis sp.
MDSLLMKQRKFLYHFKNVRWAKGRHETYLCYVVKRRDSATSFSLDFGHLRNKSGCHVELLFLRYISDWDLDPGRCYRVTWFTSWSPCYDCARHVADFLRGYPNLSLRIFAARLYFCEDRKAEPEGLRRLHRAGVQIAIMTFKDYFYCWNTFVENREKTFKAWEGLHENSVRLSRQLRRILLPLYEVDDLRDAFRTLGL

SEQ ID NO: 353 - protein, 199 aa, Bos taurus
MDSLLKKQRQFLYQFKNVRWAKGRHETYLCYVVKRRDSPTSFSLDFGHLRNKAGCHVELLFLRYISDWDLDPGRCYRVTWFTSWSPCYDCARHVADFLRGYPNLSLRIFTARLYFCDKERKAEPEGLRRLHRAGVQIAIMTFKDYFYCWNTFVENHERTFKAWEGLHENSVRLSRQLRRILLPLYEVDDLRDAFRTLGL

SEQ ID NO: 354 - protein, 429 aa, Mus sp.
MGPFCLGCSHRKCYSPIRNLISQETFKFHFKNLGYAKGRKDTFLCYEVTRKDCDSPVSLHHGVFKNKDNIHAEICFLYWFHDKVLKVLSPREEFKITWYMSWSPCFECAEQIVRFLATHHNLSLDIFSSRLYNVQDPETQQNLCRLVQEGAQVAAMDLYEFKKCWKKFVDNGGRRFRPWKRLLTNFRYQDSKLQEILRPCYIPVPSSSSSTLSNICLTKGLPETRFCVEGRRMDPLSEEEFYSQFYNQRVKHLCYYHRMKPYLCYQLEQFNGQAPLKGCLLSEKGKQHAEILFLDKIRSMELSQVTITCYLTWSPCPNCAWQLAAFKRDRPDLILHIYTSRLYFHWKRPFQKGLCSLWQSGILVDVMDLPQFTDCWTNFVNPKRPFWPWKGLEIISRRTQRRLRRIKESWGLQDLVNDFGNLQLGPPMS

SEQ ID NO: 355 - protein, 429 aa, Rattus sp.
MGPFCLGCSHRKCYSPIRNLISQETFKFHFKNLRYAIDRKDTFLCYEVTRKDCDSPVSLHHGVFKNKDNIHAEICFLYWFHDKVLKVLSPREEFKITWYMSWSPCFECAEQVLRFLATHHNLSLDIFSSRLYNIRDPENQQNLCRLVQEGAQVAAMDLYEFKKCWKKFVDNGGRRFRPWKKLLTNFRYQDSKLQEILRPCYIPVPSSSSSTLSNICLTKGLPETRFCVERRRVHLLSEEEFYSQFYNQRVKHLCYYHGVKPYLCYQLEQFNGQAPLKGCLLSEKGKQHAEILFLDKIRSMELSQVIITCYLTWSPCPNCAWQLAAFKRDRPDLILHIYTSRLYFHWKRPFQKGLCSLWQSGILVDVMDLPQFTDCWTNFVNPKRPFWPWKGLEIISRRTQRRLHRIKESWGLQDLVNDFGNLQLGPPMS

SEQ ID NO: 356 - protein, 370 aa, Macaca mulatta
MVEPMDPRTFVSNFNNRPILSGLNTVWLCCEVKTKDPSGPPLDAKIFQGKVYSKAKYHPEMRFLRWFHKWRQLHHDQEYKVTWYVSWSPCTRCANSVATFLAKDPKVTLTIFVARLYYFWKPDYQQALRILCQKRGGPHATMKIMNYNEFQDCWNKFVDGRGKPFKPRNNLPKHYTLLQATLGELLRHLMDPGTFTSNFNNKPWVSGQHETYLCYKVERLHNDTWVPLNQHRGFLRNQAPNIHGFPKGRHAELCFLDLIPFWKLDGQQYRVTCFTSWSPCFSCAQEMAKFISNNEHVSLCIFAARIYDDQGRYQEGLRALHRDGAKIAMMNYSEFEYCWDTFVDRQGRPFQPWDGLDEHSQALSGRLRAI

SEQ ID NO: 357 - protein, 384 aa, Pan sp.
MKPHFRNPVERMYQDTFSDNFYNRPILSHRNTVWLCYEVKTKGPSRPPLDAKIFRGQVYSKLKYHPEMRFFHWFSKWRKLHRDQEYEVTWYISWSPCTKCTRDVATFLAEDPKVTLTIFVARLYYFWDPDYQEALRSLCQKRDGPRATMKIMNYDEFQHCWSKFVYSQRELFEPWNNLPKYYILLHIMLGEILRHSMDPPTFTSNFNNELWVRGRHETYLCYEVERLHNDTWVLLNQRRGFLCNQAPHKHGFLEGRHAELCFLDVIPFWKLDLHQDYRVTCFTSWSPCFSCAQEMAKFISNNKHVSLCIFAARIYDDQGRCQEGLRTLAKAGAKISIMTYSEFKHCWDTFVDHQGCPFQPWDGLEEHSQALSGRLRAILQNQGN

SEQ ID NO: 358 - protein, 377 aa, Chlorocebus sp.
MNPQIRNMVEQMEPDIFVYYFNNRPILSGRNTVWLCYEVKTKDPSGPPLDANIFQGKLYPEAKDHPEMKFLHWFRKWRQLHRDQEYEVTWYVSWSPCTRCANSVATFLAEDPKVTLTIFVARLYYFWKPDYQQALRILCQERGGPHATMKIMNYNEFQHCWNEFVDGQGKPFKPRKNLPKHYTLLHATLGELLRHVMDPGTFTSNFNNKPWVSGQRETYLCYKVERSHNDTWVLLNQHRGFLRNQAPDRHGFPKGRHAELCFLDLIPFWKLDDQQYRVTCFTSWSPCFSCAQKMAKFISNNKHVSLCIFAARIYDDQGRCQEGLRTLHRDGAKIAVMNYSEFEYCWDTFVDRQGRPFQPWDGLDEHSQALSGRLRAI

SEQ ID NO: 359 - protein, 384 aa, Homo sapiens
MKPHFRNTVERMYRDTFSYNFYNRPILSRRNTVWLCYEVKTKGPSRPPLDAKIFRGQVYSELKYHPEMRFFHWFSKWRKLHRDQEYEVTWYISWSPCTKCTRDMATFLAEDPKVTLTIFVARLYYFWDPDYQEALRSLCQKRDGPRATMKIMNYDEFQHCWSKFVYSQRELFEPWNNLPKYYILLHIMLGEILRHSMDPPTFTFNFNNEPWVRGRHETYLCYEVERMHNDTWVLLNQRRGFLCNQAPHKHGFLEGRHAELCFLDVIPFWKLDLDQDYRVTCFTSWSPCFSCAQEMAKFISKNKHVSLCIFTARIYDDQGRCQEGLRTLAEAGAKISIMTYSEFKHCWDTFVDHQGCPFQPWDGLDEHSQDLSGRLRAILQNQEN

SEQ ID NO: 360 - protein, 373 aa, Homo sapiens
MKPHFRNTVERMYRDTFSYNFYNRPILSRRNTVWLCYEVKTKGPSRPRLDAKIFRGQVYSQPEHHAEMCFLSWFCGNQLPAYKCFQITWFVSWTPCPDCVAKLAEFLAEHPNVTLTISAARLYYYWERDYRRALCRLSQAGARVKIMDDEEFAYCWENFVYSEGQPFMPWYKFDDNYAFLHRTLKEILRNPMEAMYPHIFYFHFKNLRKAYGRNESWLCFTMEVVKHHSPVSWKRGVFRNQVDPETHCHAERCFLSWFCDDILSPNTNYEVTWYTSWSPCPECAGEVAEFLARHSNVNLTIFTARLYYFWDTDYQEGLRSLSQEGASVEIMGYKDFKYCWENFVYNDDEPFKPWKGLKYNFLFLDSKLQEILE

SEQ ID NO: 361 - protein, 382 aa, Homo sapiens
MNPQIRNPMERMYRDTFYDNFENEPILYGRSYTWLCYEVKIKRGRSNLLWDTGVFRGQVYFKPQYHAEMCFLSWFCGNQLPAYKCFQITWFVSWTPCPDCVAKLAEFLSEHPNVTLTISAARLYYYWERDYRRALCRLSQAGARVTIMDYEEFAYCWENFVYNEGQQFMPWYKFDENYAFLHRTLKEILRYLMDPDTFTFNFNNDPLVLRRRQTYLCYEVERLDNGTWVLMDQHMGFLCNEAKNLLCGFYGRHAELRFLDLVPSLQLDPAQIYRVTWFISWSPCFSWGCAGEVRAFLQENTHVRLRIFAARIYDYDPLYKEALQMLRDAGAQVSIMTYDEFEYCWDTFVYRQGCPFQPWDGLEEHSQALSGRLRAILQNQGN

SEQ ID NO: 362 - protein, 190 aa, Homo sapiens
MNPQIRNPMKAMYPGTFYFQFKNLWEANDRNETWLCFTVEGIKRRSVVSWKTGVFRNQVDSETHCHAERCFLSWFCDDILSPNTKYQVTWYTSWSPCPDCAGEVAEFLARHSNVNLTIFTARLYYFQYPCYQEGLRSLSQEGVAVEIMDYEDFKYCWENFVYNDNEPFKPWKGLKTNFRLLKRRLRESLQ

SEQ ID NO: 363 - protein, 199 aa, Homo sapiens
MEASPASGPRHLMDPHIFTSNFNNGIGRHKTYLCYEVERLDNGTSVKMDQHRGFLHNQAKNLLCGFYGRHAELRFLDLVPSLQLDPAQIYRVTWFISWSPCFSWGCAGEVRAFLQENTHVRLRIFAARIYDYDPLYKEALQMLRDAGAQVSIMTYDEFKHCWDTFVDHQGCPFQPWDGLDEHSQALSGRLRAILQNQGN

SEQ ID NO: 364 - protein, 200 aa, Homo sapiens
MALLTAETFRLQFNNKRRLRRPYYPRKALLCYQLTPQNGSTPTRGYFENKKKCHAEICFINEIKSMGLDETQCYQVTCYLTWSPCSSCAWELVDFIKAHDHLNLGIFASRLYYHWCKPQQKGLRLLCGSQVPVEVMGFPKFADCWENFVDHEKPLSFNPYKMLEELDKNSRAIKRRLERIKIPGVRAQGRYMDILCDAEV

SEQ ID NO: 365 - protein, 386 aa, Homo sapiens
MNPQIRNPMERMYRDTFYDNFENEPILYGRSYTWLCYEVKIKRGRSNLLWDTGVFRGPVLPKRQSNHRQEVYFRFENHAEMCFLSWFCGNRLPANRRFQITWFVSWNPCLPCVVKVTKFLAEHPNVTLTISAARLYYYRDRDWRWVLLRLHKAGARVKIMDYEDFAYCWENFVCNEGQPFMPWYKFDDNYASLHRTLKEILRNPMEAMYPHIFYFHFKNLLKACGRNESWLCFTMEVTKHHSAVFRKRGVFRNQVDPETHCHAERCFLSWFCDDILSPNTNYEVTWYTSWSPCPECAGEVAEFLARHSNVNLTIFTARLCYFWDTDYQEGLCSLSQEGASVKIMGYKDFVSCWKNFVYSDDEPFKPWKGLQTNFRLLKRRLREILQ

SEQ ID NO: 366 - protein, 236 aa, Homo sapiens
MTSEKGPSTGDPTLRRRIEPWEFDVFYDPRELRKEACLLYEIKWGMSRKIWRSSGKNTTNHVEVNFIKKFTSERDFHPSMSCSITWFLSWSPCWECSQAIREFLSRHPGVTLVIYVARLFWHMDQQNRQGLRDLVNSGVTIQIMRASEYYHCWRNFVNYPPGDEAHWPQYPPLWMMLYALELHCIILSLPPCLKISRRWQNHLTFFRLHLQNCHYQTIPPHILLATGLIHPSVAWR

SEQ ID NO: 367 - protein, 229 aa, Mus sp.
MSSETGPVAVDPTLRRRIEPHEFEVFFDPRELRKETCLLYEINWGGRHSVWRHTSQNTSNHVEVNFLEKFTTERYFRPNTRCSITWFLSWSPCGECSRAITEFLSRHPYVTLFIYIARLYHHTDQRNRQGLRDLISSGVTIQIMTEQEYCYCWRNFVNYPPSNEAYWPRYPHLWVKLYVLELYCIILGLPPCLKILRRKQPQLTFFTITLQTCHYQRIPPHLLWATGLK

SEQ ID NO: 368 - protein, 229 aa, Rattus sp. [sequence omitted]

SEQ ID NO: 369-373 - skipped (5 entries)

SEQ ID NO: 374 - protein, 239 aa, Rattus sp.
MAVGSKPKAALVGPHWERERIWCFLCSTGLGTQQTGQTSRWLRPAATQDPVSPPRSLLMKQRKFLYHFKNVRWAKGRHETYLCYVVKRRDSATSFSLDFGYLRNKSGCHVELLFLRYISDWDLDPGRCYRVTWFTSWSPCYDCARHVADFLRGNPNLSLRIFTARLTGWGALPAGLMSPARPSDYFYCWNTFVENHERTFKAWEGLHENSVRLSRRLRRILLPLYEVDDLRDAFRTLGL

SEQ ID NO: 375 - protein, 190 aa, Gorilla sp.
MNPQIRNPMKAMYPGTFYFQFKNLWEANDRNETWLCFTVEGIKRRSVVSWKTGVFRNQVDSETHCHAERCFLSWFCDDILSPNTNYQVTWYTSWSPCPECAGEVAEFLARHSNVNLTIFTARLYYFQDTDYQEGLRSLSQEGVAVKIMDYKDFKYCWENFVYNDDEPFKPWKGLKYNFRFLKRRLQEILE

SEQ ID NO: 376 - protein, 202 aa, Macaca mulatta
MDGSPASRPRHLMDPNTFTFNFNNDLSVRGRHQTYLCYEVERLDNGTWVPMDERRGFLCNKAKNVPCGDYGCHVELRFLCEVPSWQLDPAQTYRVTWFISWSPCFRRGCAGQVRVFLQENKHVRLRIFAARIYDYDPLYQEALRTLRDAGAQVSIMTYEEFKHCWDTFVDRQGRPFQPWDGLDEHSQALSGRLRAILQNQGN

SEQ ID NO: 377 - protein, 185 aa, Bos taurus
MDEYTFTENFNNQGWPSKTYLCYEMERLDGDATIPLDEYKGFVRNKGLDQPEKPCHAELYFLGKIHSWNLDRNQHYRLTCFISWSPCYDCAQKLTTFLKENHHISLHILASRIYTHNRFGCHQSGLCELQAAGARITIMTFEDFKHCWETFVDHKGKPFQPWEGLNVKSQALCTELQAILKTQQN

SEQ ID NO: 378 - protein, 396 aa, Rattus sp.
MQPQGLGPNAGMGPVCLGCSHRRPYSPIRNPLKKLYQQTFYFHFKNVRYAWGRKNNFLCYEVNGMDCALPVPLRQGVFRKQGHIHAELCFIYWFHDKVLRVLSPMEEFKVTWYMSWSPCSKCAEQVARFLAAHRNLSLAIFSSRLYYYLRNPNYQQKLCRLIQEGVHVAAMDLPEFKKCWNKFVDNDGQPFRPWMRLRINFSFYDCKLQEIFSRMNLLREDVFYLQFNNSHRVKPVQNRYYRRKSYLCYQLERANGQEPLKGYLLYKKGEQHVEILFLEKMRSMELSQVRITCYLTWSPCPNCARQLAAFKKDHPDLILRIYTSRLYFYWRKKFQKGLCTLWRSGIHVDVMDLPQFADCWTNFVNPQRPFRPWNELEKNSWRIQRRLRRIKESWGL

SEQ ID NO: 379 - protein, 227 aa, Bos taurus
DGWEVAFRSGTVLKAGVLGVSMTEGWAGSGHPGQGACVWTPGTRNTMNLLREVLFKQQFGNQPRVPAPYYRRKTYLCYQLKQRNDLTLDRGCFRNKKQRHAEIRFIDKINSLDLNPSQSYKIICYITWSPCPNCANELVNFITRNNHLKLEIFASRLYFHWIKSFKMGLQDLQNAGISVAVMTHTEFEDCWEQFVDNQSRPFQPWDKLEQYSASIRRRLQRILTAPI

SEQ ID NO: 380 - protein, 490 aa, Pan sp.
MNPQIRNPMEWMYQRTFYYNFENEPILYGRSYTWLCYEVKIRRGHSNLLWDTGVFRGQMYSQPEHHAEMCFLSWFCGNQLSAYKCFQITWFVSWTPCPDCVAKLAKFLAEHPNVTLTISAARLYYYWERDYRRALCRLSQAGARVKIMDDEEFAYCWENFVYNEGQPFMPWYKFDDNYAFLHRTLKEIIRHLMDPDTFTFNFNNDPLVLRRHQTYLCYEVERLDNGTWVLMDQHMGFLCNEAKNLLCGFYGRHAELRFLDLVPSLQLDPAQIYRVTWFISWSPCFSWGCAGQVRAFLQENTHVRLRIFAARIYDYDPLYKEALQMLRDAGAQVSIMTYDEFEYCWDTFVYRQGCPFQPWDGLEEHSQALSGRLRAILQVRASSLCMVPHRPPPPPQSPGPCLPLCSEPPLGSLLPTGRPAPSLPFLLTASFSFPPPASLPPLPSLSLSPGHLPVPSFHSLTSCSIQPPCSSRIRETEGWASVSKEGRDLG

SEQ ID NO: 381 - protein, 210 aa, Macaca mulatta
MALLTAKTFSLQFNNKRRVNKPYYPRKALLCYQLTPQNGSTPTRGHLKNKKKDHAEIRFINKIKSMGLDETQCYQVTCYLTWSPCPSCAGELVDFIKAHRHLNLRIFASRLYYHWRPNYQEGLLLLCGSQVPVEVMGLPEFTDCWENFVDHKEPPSFNPSEKLEELDKNSQAIKRRLERIKSRSVDVLENGLRSLQLGPVTPSSSIRNSR

SEQ ID NO: 382 - protein, 224 aa, Homo sapiens
MAQKEEAAVATEAASQNGEDLENLDDPEKLKELIELPPFEIVTGERLPANFFKFQFRNVEYSSGRNKTFLCYVVEAQGKGGQVQASRGYLEDEHAAAHAEEAFFNTILPAFDPALRYNVTWYVSSSPCAACADRIIKTLSKTKNLRLLILVGRLFMWEEPEIQAALKKLKEAGCKLRIMKPQDFEYVWQNFVEQEEGESKAFQPWEDIQENFLYYEEKLADILK

SEQ ID NO: 383 - protein, 224 aa, Mus sp.
MAQKEEAAEAAAPASQNGDDLENLEDPEKLKELIDLPPFEIVTGVRLPVNFFKFQFRNVEYSSGRNKTFLCYVVEVQSKGGQAQATQGYLEDEHAGAHAEEAFFNTILPAFDPALKYNVTWYVSSSPCAACADRILKTLSKTKNLRLLILVSRLFMWEEPEVQAALKKLKEAGCKLRIMKPQDFEYIWQNFVEQEEGESKAFEPWEDIQENFLYYEEKLADILK

SEQ ID NO: 384 - protein, 224 aa, Rattus sp.
MAQKEEAAEAAAPASQNGDDLENLEDPEKLKELIDLPPFEIVTGVRLPVNFFKFQFRNVEYSSGRNKTFLCYVVEAQSKGGQVQATQGYLEDEHAGAHAEEAFFNTILPAFDPALKYNVTWYVSSSPCAACADRILKTLSKTKNLRLLILVSRLFMWEEPEVQAALKKLKEAGCKLRIMKPQDFEYLWQNFVEQEEGESKAFEPWEDIQENFLYYEEKLADILK

SEQ ID NO: 385 - protein, 224 aa, Bos taurus
MAQKEEAAAAAEPASQNGEEVENLEDPEKLKELIELPPFEIVTGERLPAHYFKFQFRNVEYSSGRNKTFLCYVVEAQSKGGQVQASRGYLEDEHATNHAEEAFFNSIMPTFDPALRYMVTWYVSSSPCAACADRIVKTLNKTKNLRLLILVGRLFMWEEPEIQAALRKLKEAGCRLRIMKPQDFEYIWQNFVEQEEGESKAFEPWEDIQENFLYYEEKLADILK

SEQ ID NO: 386 - protein, 208 aa, Petromyzon marinus
MTDAEYVRIHEKLDIYTFKKQFFNNKKSVSHRCYVLFELKRRGERRACFWGYAVNKPQSGTERGIHAEIFSIRKVEEYLRDNPGQFTINWYSSWSPCADCAEKILEWYNQELRGNGHTLKIWACKLYYEKNARNQIGLWNLRDNGVGLNVMVSEHYQCCRKIFIQSSHNQLNENRWLEKTLKRAEKRRSELSIMIQVKILHTTKSPAV

SEQ ID NO: 387 - protein, 384 aa, synthetic construct
MKPHFRNTVERMYRDTFSYNFYNRPILSRRNTVWLCYEVKTKGPSRPPLDAKIFRGQVYSELKYHPEMRFFHWFSKWRKLHRDQEYEVTWYISWSPCTKCTRDMATFLAEDPKVTLTIFVARLYYFWDPDYQEALRSLCQKRDGPRATMKIMNYDEFQHCWSKFVYSQRELFEPWNNLPKYYILLHIMLGEILRHSMDPPTFTFNFNNEPWVRGRHETYLCYEVERMHNDTWVLLNQRRGFLCNQAPHKHGFLEGRHAELCFLDVIPFWKLDLDQDYRVTCFTSWSPCFSCAQEMAKFISKNKHVSLCIFTARIYRRQGRCQEGLRTLAEAGAKISIMTYSEFKHCWDTFVDHQGCPFQPWDGLDEHSQDLSGRLRAILQNQEN

SEQ ID NO: 388 - protein, 184 aa, Homo sapiens
MDPPTFTFNFNNEPWVRGRHETYLCYEVERMHNDTWVLLNQRRGFLCNQAPHKHGFLEGRHAELCFLDVIPFWKLDLDQDYRVTCFTSWSPCFSCAQEMAKFISKNKHVSLCIFTARIYDDQGRCQEGLRTLAEAGAKISIMTYSEFKHCWDTFVDHQGCPFQPWDGLDEHSQDLSGRLRAILQ

SEQ ID NO: 389 - protein, 184 aa, synthetic construct
MDPPTFTFNFNNEPWVRGRHETYLCYEVERMHNDTWVLLNQRRGFLCNQAPHKHGFLEGRHAELCFLDVIPFWKLDLDQDYRVTCFTSWSPCFSCAQEMAKFISKNKHVSLCIFTARIYRRQGRCQEGLRTLAEAGAKISIMTYSEFKHCWDTFVDHQGCPFQPWDGLDEHSQDLSGRLRAILQ

SEQ ID NO: 390-399 - skipped (10 entries)

SEQ ID NO: 400 - protein, 167 aa, Escherichia coli
MSEVEFSHEYWMRHALTLAKRAWDEREVPVGAVLVHNNRVIGEGWNRPIGRHDPTAHAEIMALRQGGLVMQNYRLIDATLYVTLEPCVMCAGAMIHSRIGRVVFGARDAKTGAAGSLMDVLHHPGMNHRVEITEGILADECAALLSDFFRMRRQEIKAQKKAQSSTD

SEQ ID NO: 401 - protein, 178 aa, Escherichia coli
MRRAFITGVFFLSEVEFSHEYWMRHALTLAKRAWDEREVPVGAVLVHNNRVIGEGWNRPIGRHDPTAHAEIMALRQGGLVMQNYRLIDATLYVTLEPCVMCAGAMIHSRIGRVVFGARDAKTGAAGSLMDVLHHPGMNHRVEITEGILADECAALLSDFFRMRRQEIKAQKKAQSSTD

SEQ ID NO: 402 - protein, 160 aa, Staphylococcus aureus
MGSHMTNDIYFMTLAIEEAKKAAQLGEVPIGAIITKDDEVIARAHNLRETLQQPTAHAEHIAIERAAKVLGSWRLEGCTLYVTLEPCVMCAGTIVMSRIPRVVYGADDPKGGCSGSLMNLLQQSNFNHRAIVDKGVLKEACSTLLTTFFKNLRANKKSTN

SEQ ID NO: 403 - protein, 161 aa, Bacillus subtilis
MTQDELYMKEAIKEAKKAEEKGEVPIGAVLVINGEIIARAHNLRETEQRSIAHAEMLVIDEACKALGTWRLEGATLYVTLEPCPMCAGAVVLSRVEKVVFGAFDPKGGCSGTLMNLLQEERFNHQAEVVSGVLEEECGGMLSAFFRELRKKKKAARKNLSE

SEQ ID NO: 404 - protein, 183 aa, Salmonella typhimurium
MPPAFITGVTSLSDVELDHEYWMRHALTLAKRAWDEREVPVGAVLVHNHRVIGEGWNRPIGRHDPTAHAEIMALRQGGLVLQNYRLLDTTLYVTLEPCVMCAGAMVHSRIGRVVFGARDAKTGAAGSLIDVLHHPGMNHRVEIIEGVLRDECATLLSDFFRMRRQEIKALKKADRAEGAGPAV

SEQ ID NO: 405 - protein, 164 aa, Shewanella putrefaciens
MDEYWMQVAMQMAEKAEAAGEVPVGAVLVKDGQQIATGYNLSISQHDPTAHAEILCLRSAGKKLENYRLLDATLYITLEPCAMCAGAMVHSRIARVVYGARDEKTGAAGTVVNLLQHPAFNHQVEVTSGVLAEACSAQLSRFFKRRRDEKKALKLAQRAQQGIE

SEQ ID NO: 406 - protein, 173 aa, Haemophilus influenzae
MDAAKVRSEFDEKMMRYALELADKAEALGEIPVGAVLVDDARNIIGEGWNLSIVQSDPTAHAEIIALRNGAKNIQNYRLLNSTLYVTLEPCTMCAGAILHSRIKRLVFGASDYKTGAIGSRFHFFDDYKMNHTLEITSGVLAEECSQKLSTFFQKRREEKKIEKALLKSLSDK

SEQ ID NO: 407 - protein, 161 aa, Caulobacter crescentus
MRTDESEDQDHRMMRLALDAARAAAEAGETPVGAVILDPSTGEVIATAGNGPIAAHDPTAHAEIAAMRAAAAKLGNYRLTDLTLVVTLEPCAMCAGAISHARIGRVVFGADDPKGGAVVHGPKFFAQPTCHWRPEVTGGVLADESADLLRGFFRARRKAKI

SEQ ID NO: 408 - protein, 179 aa, Geobacter sulfurreducens
MSSLKKTPIRDDAYWMGKAIREAAKAAARDEVPIGAVIVRDGAVIGRGHNLREGSNDPSAHAEMIAIRQAARRSANWRLTGATLYVTLEPCLMCMGAIILARLERVVFGCYDPKGGAAGSLYDLSADPRLNHQVRLSPGVCQEECGTMLSDFFRDLRRRKKAKATPALFIDERKVPPEP

SEQ ID NO: 409 - protein, 166 aa, Escherichia coli
SEVEFSHEYWMRHALTLAKRAWDEREVPVGAVLVHNNRVIGEGWNRPIGRHDPTAHAEIMALRQGGLVMQNYRLIDATLYVTLEPCVMCAGAMIHSRIGRVVFGARDAKTGAAGSLMDVLHHPGMNHRVEITEGILADECAALLSDFFRMRRQEIKAQKKAQSSTD

SEQ ID NO: 410 - protein, 166 aa, synthetic construct
SEVEFSHEYWMRHALTLAKRAWDEREVPVGAVLVHNNRVIGEGWNRPIGRHDPTAHAEIMALRQGGLVMQNYRLIDATLYVTLEPCVMCAGAMIHSRIGRVVFGARNAKTGAAGSLMDVLHHPGMNHRVEITEGILADECAALLSDFFRMRRQEIKAQKKAQSSTD

SEQ ID NO: 411 - protein, 166 aa, synthetic construct
SEVEFSHEYWMRHALTLAKRAWDEREVPVGAVLVHNNRVIGEGWNRPIGRHDPTAHAEIMALRQGGLVMQNYRLIDATLYVTLEPCVMCAGAMIHSRIGRVVFGARGAKTGAAGSLMDVLHHPGMNHRVEITEGILADECAALLSDFFRMRRQEIKAQKKAQSSTD

SEQ ID NO: 412 - protein, 166 aa, synthetic construct
SEVEFSHEYWMRHALTLAKRAWDEREVPVGAVLVHNNRVIGEGWNRPIGRHDPTAHAEIMALRQGGLVMQNYRLIDATLYVTLEPCVMCAGAMIHSRIGRVVFGARVAKTGAAGSLMDVLHHPGMNHRVEITEGILADECAALLSDFFRMRRQEIKAQKKAQSSTD

SEQ ID NO: 413 - protein, 166 aa, synthetic construct
SEVEFSYEYWMRHALTLAKRAWDEREVPVGAVLVHNNRVIGEGWNRPIGRHDPTAHAEIMALRQGGLVMQNYRLIDATLYVTLEPCVMCAGAMIHSRIGRVVFGARNAKTGAAGSLMDVLHHPGMSHRVEITEGILADECAALLSDFFRMRRQEIKAQKKAQSSTD

SEQ ID NO: 414 - protein, 166 aa, synthetic construct
SEVEFSYEYWMRHALTLAKRAWDEREVPVGAVLVHNNRVIGEGWNRPIGRHDPTAHAEIMALRQGGLVMQNYRLIDATLYVTLEPCVMCAGAMIHSRIGRVVFGARNAKTGAAGSLMDVLHHPGMSHRVEITEGILADECAALLSDFFRMRRQDIKAQKKAQSSTD

SEQ ID NO: 415 - protein, 166 aa, synthetic construct
SEVEFSYEYWMRHALTLAKRAWDEREVPVGAVLVHNNRVIGEGWNRPIGRHDPTAHAEIMALRQGGLVMQNYRLIDATLYVTLEPCVMCAGAMIHSRIGRVVFGARNAKTGAAGSLMDVLHHPGMSHRVEITEGILADECAALLSDFFRMRRQGIKAQKKAQSSTD

SEQ ID NO: 416 - protein, 166 aa, synthetic construct
SEVEFSYEYWMRHALTLAKRAWDEREVPVGAVLVHNNRVIGEGWNRPIGRHDPTAHAEIMALRQGGLVMQNYRLIDATLYVTLEPCVMCAGAMIHSRIGRVVFGARNAKTGAAGSLMDVLHHPGMSHRVEITEGILADECAALLSDFFRMRRQVIKAQKKAQSSTD

SEQ ID NO: 417 - protein, 166 aa, synthetic construct
SEVEFSHEYWMRHALTLAKRAWDEREVPVGAVLVHNNRVIGEGWNRPIGRHDPTAHAEIMALRQGGLVMQNYRLIDATLYVTLEPCVMCAGAMIHSRIGRVVFGVRNAKTGAAGSLMDVLHHPGMNHRVEITEGILADECAALLSYFFRMRRQVIKAQKKAQSSTD

SEQ ID NO: 418 - protein, 166 aa, synthetic construct
SEVEFSHEYWMRHALTLAKRAWDEREVPVGAVLVHNNRVIGEGWNRPIGRHDPTAHAEIMALRQGGLVMQNYRLIDATLYVTFEPCVMCAGAMIHSRIGRVVFGVRNAKTGAAGSLMDVLHYPGMNHRVEITEGILADECAALLSYFFRMRRQVFKAQKKAQSSTD

SEQ ID NO: 419 - protein, 166 aa, synthetic construct
AEVEFSHEYWMRHALTLAKRAWDEREVPVGAVLVHNNRVIGEGWNRPFGRHDPTAHAEIMALRQGGLVMQNYRLIDATLYVTLEPCVMCAGAMIHSRIGRVVFGVRNAKTGAAGSLMDVLHHPGMNHRVEITEGILADECAALLSYFFRMRRQVIKAQKKAQSSTD

SEQ ID NO: 420 - protein, 166 aa, synthetic construct
SEVEFSYEYWMRHALTLAKRAWDEREVPVGAVLVHNNRVIGEGWNRPIGRHDPTAHAEIMALRQGGLVMQNYRLIDATLYVTLEPCVMCAGAMIHSRIGRVVFGTRNAKTGAAGSLMDVLHHPGMSHRVEITEGILADECAALLSDFFRMRRQEIKAQSKAQSSTD

SEQ ID NO: 421 - protein, 166 aa, synthetic construct
SEVEFSHEYWMRHALTLAKRAWDEGEVPVGAVLVHNNRVIGEGWNRPIGRHDPTAHAEIMALRQGGLVMQNYRLIDATLYVTFEPCVMCAGAMIHSRIGRVVFGVHNAKTGAAGSLMDVLHYPGMNHRVEITEGILADECNDLLSYFFRMRRQVFKAQKKAQSSTD

SEQ ID NO: 422 - protein, 166 aa, synthetic construct
SEVEFSHEYWMRHALTLAKRAWDGGEVPVGAVLVHNNRVIGEGWNRPIGRHDPTAHAEIMALRQGGLVMQNYRLIDATLYVTFEPCVMCAGAMIHSRIGRVVFGVHNAKTGAAGSLMDVLHYPGMNHRVEITEGILADECNDLLSYFFRMRRQVFKAQKKAQSSTD

SEQ ID NO: 423 - protein, 166 aa, synthetic construct
SEVEFSHEYWMRHALTLAKRAWDDGEVPVGAVLVHNNRVIGEGWNRPIGRHDPTAHAEIMALRQGGLVMQNYRLIDATLYVTFEPCVMCAGAMIHSRIGRVVFGVKNAKTGAAGSLMDVLHYPGMNHRVEITEGILADECNGLLSYFFRMRRQVFKAQKKAQSSTD

SEQ ID NO: 424 - protein, 166 aa, synthetic construct
SEVEFSHEYWMRHALTLAKRAWDEQEVPVGAVLVHNNRVIGEGWNRPIGRHDPTAHAEIMALRQGGLVMQNYRLIDATLYVTFEPCVMCAGAMIHSRIGRVVFGVRNAKTGAAGSLMDVLHYPGMNHRVEITEGILADECNALLSYFFRMRRQVFKAQKKAQSSTD

SEQ ID NO: 425 - protein, 166 aa, synthetic construct
SEVEFSHEYWMRHALTLAKRAWDMGEVPVGAVLVHNNRVIGEGWNRPIGRHDPTAHAEIMALRQGGLVMQNYRLIDATLYVTFEPCVMCAGAMIHSRIGRVVFGVPNAKTGAAGSLMDVLHYPGMNHRVEITEGILADECNDLLSYFFRMRRQVFKAQKKAQSSTD

SEQ ID NO: 426 - protein, 166 aa, synthetic construct
SEVEFSHEYWMRHALTLAKRAWDECEVPVGAVLVHNNRVIGEGWNRPIGRHDPTAHAEIMALRQGGLVMQNYRLIDATLYVTFEPCVMCAGAMIHSRIGRVVFGVHNAKTGAAGSLMDVLHYPGMNHRVEITEGILADECNALLSYFFRMRRQVFKAQKKAQSSTD

SEQ ID NO: 427 - protein, 166 aa, synthetic construct
SEVEFSHEYWMRHALTLAKRAWDEREVPVGAVLVHNNRVIGEGWNRPIGRHDPTAHAEIMALRQGGLVMQNYRLIDATLYVTFEPCVMCAGAMIHSRIGRVVFGVRNAKTGAAGSLMDVLHYPGMNHRVEITEGILADECNLLLSYFFRMRRQVFKAQKKAQSSTD

SEQ ID NO: 428 - protein, 166 aa, synthetic construct
SEVEFSHEYWMRHALTLAKRAWDEGEVPVGAVLVHNNRVIGEGWNRPIGRHDPTAHAEIMALRQGGLVMQNYRLIDATLYVTFEPCVMCAGAMIHSRIGRVVFGVRNAKTGAAGSLMDVLHYPGMNHRVEITEGILADECNALLSYFFRMRRQVFKAQKKAQSSTD

SEQ ID NO: 429 - protein, 166 aa, synthetic construct
SEVEFSHEYWMRHALTLAKRAWDAGEVPVGAVLVHNNRVIGEGWNRPIGRHDPTAHAEIMALRQGGLVMQNYRLIDATLYVTFEPCVMCAGAMIHSRIGRVVFGVNNAKTGAAGSLMDVLHYPGMNHRVEITEGILADECNELLSYFFRMRRQVFKAQKKAQSSTD

SEQ ID NO: 430 - protein, 166 aa, synthetic construct; identical to SEQ ID NO: 418

SEQ ID NO: 431 - protein, 166 aa, synthetic construct
SEVEFSHEYWMRHALTLAKRAWDEREVPVGAVLVHTNRVIGEGWNRTIGRHDPTAHAEIMALRQGGLVMQNYRLIDATLYVTFEPCVMCAGAMIHSRIGRVVFGVRNAKTGAAGSLMDVLHYPGMNHRVEITEGILADECAALLSYFFRMRRQVFKAQKKAQSSTD

SEQ ID NO: 432 - protein, 166 aa, synthetic construct
SEVEFSHEYWMRHALTLAKRAWDEREVPVGAVLVHSNRVIGEGWNRPIGRHDPTAHAEIMALRQGGLVMQNYRLIDATLYVTFEPCVMCAGAMIHSRIGRVVFGVRNAKTGAAGSLMDVLHYPGMNHRVEITEGILADECAALLSYFFRMRRQVFKAQKKAQSSTD

SEQ ID NO: 433 - protein, 166 aa, synthetic construct
SEVEFSHEYWMRHALTLAKRAWDEREVPVGAVLVLNNRVIGEGWNRPIGRHDPTAHAEIMALRQGGLVMQNYRLIDATLYVTFEPCVMCAGAMIHSRIGRVVFGVRNAKTGAAGSLMDVLHYPGMNHRVEITEGILADECAALLSYFFRMRRQVFKAQKKAQSSTD

SEQ ID NO: 434 - protein, 166 aa, synthetic construct
SEVEFSHEYWMRHALTLAKRAWDEREVPVGAVLVHNNRVIGEGWNRPIGRHDPTAHAEIMALRQGGLVMQNYRLIDATLYVTFEPCVMCAGAMIHSRIGRVVFGVRNAKTGAAGSLMDVLHYPGMNHRVEITEGILADECAALLRYFFRMRRQVFKAQKKAQSSTD

SEQ ID NO: 435 - protein, 166 aa, synthetic construct
SEVEFSHEYWMRHALTLAKRAWDEREVPVGAVLVLNNRVIGEGWNRLIGRHDPTAHAEIMALRQGGLVMQNYRLIDATLYVTFEPCVMCAGAMIHSRIGRVVFGVRNAKTGAAGSLMDVLHYPGMNHRVEITEGILADECAALLSYFFRMRRQVFKAQKKAQSSTD

SEQ ID NO: 436 - protein, 166 aa, synthetic construct
SEVEFSHEYWMRHALTLAKRAWDEREVPVGAVLVLNNRVIGEGWNRPIGRHDPTAHAEIMALRQGGLVMQNYRLIDATLYVTFEPCVMCAGAMIHSRIGRVVFGVRNAKTGAAGSLMDVLHYPGMNHRVEITEGILADECAALLSYFFRMRRQVFNAQKKAQSSTD

SEQ ID NO: 437 - protein, 166 aa, synthetic construct
SEVEFSHEYWMRHALTLAKRAWDEREVPVGAVLVLNNRVIGEGWNRPIGRHDPTAHAEIMALRQGGLVMQNYRLIDATLYVTFEPCVMCAGAMIHSRIGRVVFGVRNAKTGAAGSLMDVLHYPGMNHRVEITEGILADECAALLCYFFRMRRQVFKAQKKAQSSTD

SEQ ID NO: 438 - protein, 166 aa, synthetic construct; identical to SEQ ID NO: 434

SEQ ID NO: 439 - protein, 166 aa, synthetic construct
SEVEFSHEYWMRHALTLAKRAWDEREVPVGAVLVHSNRVIGEGWNRPIGHHDPTAHAEIMALRQGGLVMQNYRLIDATLYVTFEPCVMCAGAMIHSRIGRVVFGVRNAKTGAAGSLMDVLHYPGMNHRVEITEGILADECAALLSYFFRMRRQVFKAQKKAQSSTD

SEQ ID NO: 440 - protein, 166 aa, synthetic construct
SEVEFSHEYWMRHALTLAKRAWDEREVPVGAVLVHNNRVIGEGWNRPIGLHDPTAHAEIMALRQGGLVMQNYRLIDATLYVTFEPCVMCAGAMIHSRIGRVVFGVRNAKTGAAGSLMDVLHYPGMNHRVEITEGILADECAALLSYFFRMRRQVFNAQKKAQSSTD

SEQ ID NO: 441 - protein, 166 aa, synthetic construct
SEVEFSHEYWMRHALTLAKRAWDEREVPVGAVLVHNNRVIGEGWNRPIGHHDPTAHAEIMALRQGGLVMQNYRLIDATLYVTFEPCVMCAGAMIHSRIGRVVFGVRNAKTGAAGSLMDVLHYPGMNHRVEITEGILADECAALLSYFFRMRRQVFNAQKKAQSSTD

SEQ ID NO: 442 - protein, 166 aa, synthetic construct
SEVEFSHEYWMRHALTLAKRAWDEREVPVGAVLVHNNRVIGEGWNRSIGRHDPTAHAEIMALRQGGLVMQNYRLIDATLYVTLEPCVMCAGAMIHSRIGRVVFGARDAKTGAAGSLMDVLHHPGMNHRVEITEGILADECAALLSDFFRMRRQEIKAQKKAQSSTD

SEQ ID NO: 443 - protein, 166 aa, synthetic construct
SEVEFSHEYWMRHALTLAKRAWDEREVPVGAVLVHNNRVIGEGWNRTIGRHDPTAHAEIMALRQGGLVMQNYRLIDATLYVTLEPCVMCAGAMIHSRIGRVVFGARDAKTGAAGSLMDVLHHPGMNHRVEITEGILADECAALLSDFFRMRRQEIKAQKKAQSSTD

SEQ ID NO: 444 - protein, 166 aa, synthetic construct
SEVEFSHEYWMRHALTLAKRAWDEREVPVGAVLVHNNRVIGEGWNRAIGRHDPTAHAEIMALRQGGLVMQNYRLIDATLYVTLEPCVMCAGAMIHSRIGRVVFGARDAKTGAAGSLMDVLHHPGMNHRVEITEGILADECAALLSDFFRMRRQEIKAQKKAQSSTD

SEQ ID NO: 445 - protein, 166 aa, synthetic construct
SEVEFSHEYWMRHALTLAKRAWDEREVPVGAVLVHNNRVIGEGWNRPIGRHDPTAHAEIMALRQGGLVMQNYRLIDATLYVTLEPCVMCAGAMIHSRIGRVVFGARDAKTGAAGSLMDVLHHPGMNHRVEITEGILADECNALLSDFFRMRRQEIKAQKKAQSSTD

SEQ ID NO: 446 - protein, 166 aa, synthetic construct
SEVEFSHEYWMRHALTLAKRARDEREVPVGAVLVHNNRVIGEGWNRPIGRHDPTAHAEIMALRQGGLVMQNYRLIDATLYVTLEPCVMCAGAMIHSRIGRVVFGARDAKTGAAGSLMDVLHHPGMNHRVEITEGILADECAALLSDFFRMRRQEIKAQKKAQSSTD

SEQ ID NO: 447 - protein, 166 aa, synthetic construct
SEVEFSHEYWMRHALTLAKRALDEREVPVGAVLVHNNRVIGEGWNRPIGRHDPTAHAEIMALRQGGLVMQNYRLIDATLYVTLEPCVMCAGAMIHSRIGRVVFGARDAKTGAAGSLMDVLHHPGMNHRVEITEGILADECAALLSDFFRMRRQEIKAQKKAQSSTD

SEQ ID NO: 448 - protein, 166 aa, synthetic construct
SEVEFSHEYWMRHALTLAKRAWDEREVPVGAVLVHNNRVIGEGWNRPIGRHDPTAHAEIMALRQGGLVMQNYRLIDATLYVTLEPCVMCAGAMIHSRIGRVVFGARDAKTGAAGSLMDVLHHPGMNHRVEITEGILADECAALLSDFFRMPRQEIKAQKKAQSSTD

SEQ ID NO: 449 - protein, 166 aa, synthetic construct
SEVEFSHEYWMRHALTLAKRAWDEREVPVGAVLVHNNRVIGEGWNRPIGRHDPTAHAEIMALRQGGLVMQNYRLIDATLYVTLEPCVMCAGAMIHSRIGRVVFGARDAKTGAAGSLMDVLHHPGMNHRVEITEGILADECAALLSDFFRMHRQEIKAQKKAQSSTD

SEQ ID NO: 450 - protein, 166 aa, synthetic construct; identical to SEQ ID NO: 418

SEQ ID NO: 451 - protein, 166 aa, synthetic construct
SEVEFSHEYWMRHALTLAKRAWDEREVPVGAVLVLNNRVIGEGWNRPIGLHDPTAHAEIMALRQGGLVMQNYRLIDATLYVTFEPCVMCAGAMIHSRIGRVVFGVRNAKTGAAGSLMDVLHYPGMNHRVEITEGILADECAALLCYFFRMRRQVFNAQKKAQSSTD

SEQ ID NO: 452 - protein, 166 aa, synthetic construct
SEVEFSHEYWMRHALTLAKRAWDEREVPVGAVLVLNNRVIGEGWNRSIGLHDPTAHAEIMALRQGGLVMQNYRLIDATLYVTFEPCVMCAGAMIHSRIGRVVFGVRNAKTGAAGSLMDVLHYPGMNHRVEITEGILADECAALLCYFFRMRRQVFNAQKKAQSSTD

SEQ ID NO: 453 - protein, 166 aa, synthetic construct
SEVEFSHEYWMRHALTLAKRAWDEREVPVGAVLVLNNRVIGEGWNRAIGLHDPTAHAEIMALRQGGLVMQNYRLIDATLYVTFEPCVMCAGAMIHSRIGRVVFGVRNAKTGAAGSLMDVLHYPGMNHRVEITEGILADECAALLCYFFRMRRQVFNAQKKAQSSTD

SEQ ID NO: 454 - protein, 166 aa, synthetic construct
SEVEFSHEYWMRHALTLAKRALDEREVPVGAVLVLNNRVIGEGWNRAIGLHDPTAHAEIMALRQGGLVMQNYRLIDATLYVTFEPCVMCAGAMIHSRIGRVVFGVRNAKTGAAGSLMDVLHYPGMNHRVEITEGILADECAALLCYFFRMPRQVFNAQKKAQSSTD

SEQ ID NO: 455 - protein, 166 aa, synthetic construct
SEVEFSHEYWMRHALTLAKRAWDEREVPVGAVLVLNNRVIGEGWNRSIGLHDPTAHAEIMALRQGGLVMQNYRLIDATLYVTFEPCVMCAGAMIHSRIGRVVFGVRNAKTGAAGSLMDVLHYPGMNHRVEITEGILADECNALLCYFFRMRRQVFNAQKKAQSSTD

SEQ ID NO: 456 - protein, 166 aa, synthetic construct
SEVEFSHEYWMRHALTLAKRALDEREVPVGAVLVLNNRVIGEGWNRAIGLHDPTAHAEIMALRQGGLVMQNYRLIDATLYVTFEPCVMCAGAMIHSRIGRVVFGVRNAKTGAAGSLMDVLHYPGMNHRVEITEGILADECNALLCYFFRMRRQVFNAQKKAQSSTD

SEQ ID NO: 457 - protein, 166 aa, synthetic construct
SEVEFSHEYWMRHALTLAKRALDEREVPVGAVLVLNNRVIGEGWNRAIGLHDPTAHAEIMALRQGGLVMQNYRLIDATLYVTFEPCVMCAGAMIHSRIGRVVFGVRNAKTGAAGSLMDVLHYPGMNHRVEITEGILADECNALLCYFFRMPRQVFNAQKKAQSSTD

SEQ ID NO: 458 - protein, 166 aa, synthetic construct; identical to SEQ ID NO: 454

SEQ ID NO: 459-499 - skipped (41 entries)

SEQ ID NO: 500 - protein, 84 aa, unidentified
  source 1..84: note = Bacillus phage PBS2 sequence
MTNLSDIIEKETGKQLVIQESILMLPEEVEEVIGNKPESDILVHTAYDESTDENVMLLTSDAPEYKPWALVIQDSNGENKIKML

SEQ ID NO: 501 - protein, 181 aa, Erwinia tasmaniensis
MASRGVNKVILVGNLGQDPEVRYMPNGGAVANITLATSESWRDKQTGETKEKTEWHRVVLFGKLAEVAGEYLRKGSQVYIEGALQTRKWTDQAGVEKYTTEVVVNVGGTMQMLGGRSQGGGASAGGQNGGSNNGWGQPQQPQGGNQFSGGAQQQARPQQQPQQNNAPANNEPPIDFDDDIP

SEQ ID NO: 502 - protein, 209 aa, unidentified
  source 1..209: note = UdgX sequence
MAGAQDFVPHTADLAELAAAAGECRGCGLYRDATQAVFGAGGRSARIMMIGEQPGDKEDLAGLPFVGPAGRLLDRALEAADIDRDALYVTNAVKHFKFTRAAGGKRRIHKTPSRTEVVACRPWLIAEMTSVEPDVVVLLGATAAKALLGNDFRVTQHRGEVLHVDDVPGDPALVATVHPSSLLRGPKEERESAFAGLVDDLRVAADVRP

SEQ ID NO: 503 - protein, 313 aa, unidentified
  source 1..313: note = UDG sequence
MIGQKTLYSFFSPSPARKRHAPSPEPAVQGTGVAGVPEESGDAAAIPAKKAPAGQEEPGTPPSSPLSAEQLDRIQRNKAAALLRLAARNVPVGFGESWKKHLSGEFGKPYFIKLMGFVAEERKHYTVYPPPHQVFTWTQMCDIKDVKVVILGQEPYHGPNQAHGLCFSVQRPVPPPPSLENIYKELSTDIEDFVHPGHGDLSGWAKQGVLLLNAVLTVRAHQANSHKERGWEQFTDAVVSWLNQNSNGLVFLLWGSYAQKKGSAIDRKRHHVLQTAHPSPLSVYRGFFGCRHFSKTNELLQKSGKKPIDWKEL

SEQ ID NO: 504-509 - skipped (6 entries)

SEQ ID NO: 510 - protein, 219 aa, synthetic construct
KGHLTRLGLEFFDQPAVPLARAFLGQVLVRRLPNGTELRGRIVETQAYLGPEDEAAHSRGGRQTPRNRGMFMKPGTLYVYIIYGMYFCMNISSQGDGACVLLRALEPLEGLETMRQLRSTLRKGTASRVLKDRELCSGPSKLCQALAINKSFDQRDLAQDEAVWLERGPLEPSEPAVVAAARVGVGHAGEWARKPLRFYVRGSPWVSVVDRVAEQDTQA

SEQ ID NO: 511 - protein, 222 aa, synthetic construct
DLASLRAQQIELASSVIREDRLDKDPPDLIAGAAVGFEQGGEVTRAAMVLLKYPSLELVEYKVARIATTMPYIPGFLSFREYPALLAAWEMLSQKPDLVFVDGHGISHPRRLGVASHFGLLVDVPTIGVAKKRLCGKFEPLSSEPGALAPLMDKGEQLAWVWRSKARCNPLFIATGHRVSVDSALAWVQRCMKGYRLPEPTRWADAVASERPAFVRYTANQP

SEQ ID NO: 512-519 - skipped (8 entries)

SEQ ID NO: 520 - protein, 7 aa, synthetic construct
PKKKRKV

SEQ ID NO: 521 - protein, 30 aa, synthetic construct
MDSLLMNRRKFLYQFKNVRWAKGRRETYLC

SEQ ID NO: 522 - protein, 11 aa, synthetic construct
SPKKKRKVEAS

SEQ ID NO: 523-539 - skipped (17 entries)

SEQ ID NO: 540 - protein, 1633 aa, synthetic construct
MGSSHHHHHHMSSETGPVAVDPTLRRRIEPHEFEVFFDPRELRKETCLLYEINWGGRHSIWRHTSQNTNKHVEVNFIEKFTTERYFCPNTRCSITWFLSWSPCGECSRAITEFLSRYPHVTLFIYIARLYHHADPRNRQGLRDLISSGVTIQIMTEQESGYCWRNFVNYSPSNEAHWPRYPHLWVRLYVLELYCIILGLPPCLNILRRKQPQLTFFTIALQSCHYQRLPPHILWATGLKSGSETPGTSESATPESDKKYSIGLAIGTNSVGWAVITDEYKVPSKKFKVLGNTDRHSIKKNLIGALLFDSGETAEATRLKRTARRRYTRRKNRICYLQEIFSNEMAKVDDSFFHRLEESFLVEEDKKHERHPIFGNIVDEVAYHEKYPTIYHLRKKLVDSTDKADLRLIYLALAHMIKFRGHFLIEGDLNPDNSDVDKLFIQLVQTYNQLFEENPINASGVDAKAILSARLSKSRRLENLIAQLPGEKKNGLFGNLIALSLGLTPNFKSNFDLAEDAKLQLSKDTYDDDLDNLLAQIGDQYADLFLAAKNLSDAILLSDILRVNTEITKAPLSASMIKRYDEHHQDLTLLKALVRQQLPEKYKEIFFDQSKNGYAGYIDGGASQEEFYKFIKPILEKMDGTEELLVKLNREDLLRKQRTFDNGSIPHQIHLGELHAILRRQEDFYPFLKDNREKIEKILTFRIPYYVGPLARGNSRFAWMTRKSEETITPWNFEEVVDKGASAQSFIERMTNFDKNLPNEKVLPKHSLLYEYFTVYNELTKVKYVTEGMRKPAFLSGEQKKAIVDLLFKTNRKVTVKQLKEDYFKKIECFDSVEISGVEDRFNASLGTYHDLLKIIKDKDFLDNEENEDILEDIVLTLTLFEDREMIEERLKTYAHLFDDKVMKQLKRRRYTGWGRLSRKLINGIRDKQSGKTILDFLKSDGFANRNFMQLIHDDSLTFKEDIQKAQVSGQGDSLHEHIANLAGSPAIKKGILQTVKVVDELVKVMGRHKPENIVIEMARENQTTQKGQKNSRERMKRIEEGIKELGSQILKEHPVENTQLQNEKLYLYYLQNGRDMYVDQELDINRLSDYDVDAIVPQSFLKDDSIDNKVLTRSDKNRGKSDNVPSEEVVKKMKNYWRQLLNAKLITQRKFDNLTKAERGGLSELDKAGFIKRQLVETRQITKHVAQILDSRMNTKYDENDKLIREVKVITLKSKLVSDFRKDFQFYKVREINNYHHAHDAYLNAVVGTALIKKYPKLESEFVYGDYKVYDVRKMIAKSEQEIGKATAKYFFYSNIMNFFKTEITLANGEIRKRPLIETNGETGEIVWDKGRDFATVRKVLSMPQVNIVKKTEVQTGGFSKESILPKRNSDKLIARKKDWDPKKYGGFDSPTVAYSVLVVAKVEKGKSKKLKSVKELLGITIMERSSFEKNPIDFLEAKGYKEVKKDLIIKLPKYSLFELENGRKRMLASAGELQKGNELALPSKYVNFLYLASHYEKLKGSPEDNEQKQLFVEQHKHYLDEIIEQISEFSKRVILADANLDKVLSAYNKHRDKPIREQAENIIHLFTLTNLGAPAAFKYFDTTIDRKRYTSTKEVLDATLIHQSITGLYETRIDLSQLGGDSGGSPKKKRKV

SEQ ID NO: 541 - protein, 1623 aa, synthetic construct
MSSETGPVAVDPTLRRRIEPHEFEVFFDPRELRKETCLLYEINWGGRHSIWRHTSQNTNKHVEVNFIEKFTTERYFCPNTRCSITWFLSWSPCGECSRAITEFLSRYPHVTLFIYIARLYHHADPRNRQGLRDLISSGVTIQIMTEQESGYCWRNFVNYSPSNEAHWPRYPHLWVRLYVLELYCIILGLPPCLNILRRKQPQLTFFTIALQSCHYQRLPPHILWATGLKSGSETPGTSESATPESDKKYSIGLAIGTNSVGWAVITDEYKVPSKKFKVLGNTDRHSIKKNLIGALLFDSGETAEATRLKRTARRRYTRRKNRICYLQEIFSNEMAKVDDSFFHRLEESFLVEEDKKHERHPIFGNIVDEVAYHEKYPTIYHLRKKLVDSTDKADLRLIYLALAHMIKFRGHFLIEGDLNPDNSDVDKLFIQLVQTYNQLFEENPINASGVDAKAILSARLSKSRRLENLIAQLPGEKKNGLFGNLIALSLGLTPNFKSNFDLAEDAKLQLSKDTYDDDLDNLLAQIGDQYADLFLAAKNLSDAILLSDILRVNTEITKAPLSASMIKRYDEHHQDLTLLKALVRQQLPEKYKEIFFDQSKNGYAGYIDGGASQEEFYKFIKPILEKMDGTEELLVKLNREDLLRKQRTFDNGSIPHQIHLGELHAILRRQEDFYPFLKDNREKIEKILTFRIPYYVGPLARGNSRFAWMTRKSEETITPWNFEEVVDKGASAQSFIERMTNFDKNLPNEKVLPKHSLLYEYFTVYNELTKVKYVTEGMRKPAFLSGEQKKAIVDLLFKTNRKVTVKQLKEDYFKKIECFDSVEISGVEDRFNASLGTYHDLLKIIKDKDFLDNEENEDILEDIVLTLTLFEDREMIEERLKTYAHLFDDKVMKQLKRRRYTGWGRLSRKLINGIRDKQSGKTILDFLKSDGFANRNFMQLIHDDSLTFKEDIQKAQVSGQGDSLHEHIANLAGSPAIKKGILQTVKVVDELVKVMGRHKPENIVIEMARENQTTQKGQKNSRERMKRIEEGIKELGSQILKEHPVENTQLQNEKLYLYYLQNGRDMYVDQELDINRLSDYDVDAIVPQSFLKDDSIDNKVLTRSDKNRGKSDNVPSEEVVKKMKNYWRQLLNAKLITQRKFDNLTKAERGGLSELDKAGFIKRQLVETRQITKHVAQILDSRMNTKYDENDKLIREVKVITLKSKLVSDFRKDFQFYKVREINNYHHAHDAYLNAVVGTALIKKYPKLESEFVYGDYKVYDVRKMIAKSEQEIGKATAKYFFYSNIMNFFKTEITLANGEIRKRPLIETNGETGEIVWDKGRDFATVRKVLSMPQVNIVKKTEVQTGGFSKESILPKRNSDKLIARKKDWDPKKYGGFDSPTVAYSVLVVAKVEKGKSKKLKSVKELLGITIMERSSFEKNPIDFLEAKGYKEVKKDLIIKLPKYSLFELENGRKRMLASAGELQKGNELALPSKYVNFLYLASHYEKLKGSPEDNEQKQLFVEQHKHYLDEIIEQISEFSKRVILADANLDKVLSAYNKHRDKPIREQAENIIHLFTLTNLGAPAAFKYFDTTIDRKRYTSTKEVLDATLIHQSITGLYETRIDLSQLGGDSGGSPKKKRKV

SEQ ID NO: 542 - protein, 1629 aa, synthetic construct
MTSEKGPSTGDPTLRRRIEPWEFDVFYDPRELRKEACLLYEIKWGMSRKIWRSSGKNTTNHVEVNFIKKFTSERDFHPSMSCSITWFLSWSPCWECSQAIREFLSRHPGVTLVIYVARLFWHMDQQNRQGLRDLVNSGVTIQIMRASEYYHCWRNFVNYPPGDEAHWPQYPPLWMMLYALELHCIILSLPPCLKISRRWQNHLTFFRLHLQNCHYQTIPPHILLATGLIHPSVAWRGSETPGTSESATPESDKKYSIGLAIGTNSVGWAVITDEYKVPSKKFKVLGNTDRHSIKKNLIGALLFDSGETAEATRLKRTARRRYTRRKNRICYLQEIFSNEMAKVDDSFFHRLEESFLVEEDKKHERHPIFGNIVDEVAYHEKYPTIYHLRKKLVDSTDKADLRLIYLALAHMIKFRGHFLIEGDLNPDNSDVDKLFIQLVQTYNQLFEENPINASGVDAKAILSARLSKSRRLENLIAQLPGEKKNGLFGNLIALSLGLTPNFKSNFDLAEDAKLQLSKDTYDDDLDNLLAQIGDQYADLFLAAKNLSDAILLSDILRVNTEITKAPLSASMIKRYDEHHQDLTLLKALVRQQLPEKYKEIFFDQSKNGYAGYIDGGASQEEFYKFIKPILEKMDGTEELLVKLNREDLLRKQRTFDNGSIPHQIHLGELHAILRRQEDFYPFLKDNREKIEKILTFRIPYYVGPLARGNSRFAWMTRKSEETITPWNFEEVVDKGASAQSFIERMTNFDKNLPNEKVLPKHSLLYEYFTVYNELTKVKYVTEGMRKPAFLSGEQKKAIVDLLFKTNRKVTVKQLKEDYFKKIECFDSVEISGVEDRFNASLGTYHDLLKIIKDKDFLDNEENEDILEDIVLTLTLFEDREMIEERLKTYAHLFDDKVMKQLKRRRYTGWGRLSRKLINGIRDKQSGKTILDFLKSDGFANRNFMQLIHDDSLTFKEDIQKAQVSGQGDSLHEHIANLAGSPAIKKGILQTVKVVDELVKVMGRHKPENIVIEMARENQTTQKGQKNSRERMKRIEEGIKELGSQILKEHPVENTQLQNEKLYLYYLQNGRDMYVDQELDINRLSDYDVDAIVPQSFLKDDSIDNKVLTRSDKNRGKSDNVPSEEVVKKMKNYWRQLLNAKLITQRKFDNLTKAERGGLSELDKAGFIKRQLVETRQITKHVAQILDSRMNTKYDENDKLIREVKVITLKSKLVSDFRKDFQFYKVREINNYHHAHDAYLNAVVGTALIKKYPKLESEFVYGDYKVYDVRKMIAKSEQEIGKATAKYFFYSNIMNFFKTEITLANGEIRKRPLIETNGETGEIVWDKGRDFATVRKVLSMPQVNIVKKTEVQTGGFSKESILPKRNSDKLIARKKDWDPKKYGGFDSPTVAYSVLVVAKVEKGKSKKLKSVKELLGITIMERSSFEKNPIDFLEAKGYKEVKKDLIIKLPKYSLFELENGRKRMLASAGELQKGNELALPSKYVNFLYLASHYEKLKGSPEDNEQKQLFVEQHKHYLDEIIEQISEFSKRVILADANLDKVLSAYNKHRDKPIREQAENIIHLFTLTNLGAPAAFKYFDTTIDRKRYTSTKEVLDATLIHQSITGLYETRIDLSQLGGDSGGSPKKKRKV

SEQ ID NO: 543 - protein, 1699 aa, synthetic construct
MSSETGPVAVDPTLRRRIEPHEFEVFFDPRELRKETCLLYEINWGGRHSIWRHTSQNTNKHVEVNFIEKFTTERYFCPNTRCSITWFLSWSPCGECSRAITEFLSRYPHVTLFIYIARLYHHADPRNRQGLRDLISSGVTIQIMTEQESGYCWRNFVNYSPSNEAHWPRYPHLWVRLYVLELYCIILGLPPCLNILRRKQPQLTFFTIALQSCHYQRLPPHILWATGLKSGSETPGTSESATPESDKKYSIGLAIGTNSVGWAVITDEYKVPSKKFKVLGNTDRHSIKKNLIGALLFDSGETAEATRLKRTARRRYTRRKNRICYLQEIFSNEMAKVDDSFFHRLEESFLVEEDKKHERHPIFGNIVDEVAYHEKYPTIYHLRKKLVDSTDKADLRLIYLALAHMIKFRGHFLIEGDLNPDNSDVDKLFIQLVQTYNQLFEENPINASGVDAKAILSARLSKSRRLENLIAQLPGEKKNGLFGNLIALSLGLTPNFKSNFDLAEDAKLQLSKDTYDDDLDNLLAQIGDQYADLFLAAKNLSDAILLSDILRVNTEITKAPLSASMIKRYDEHHQDLTLLKALVRQQLPEKYKEIFFDQSKNGYAGYIDGGASQEEFYKFIKPILEKMDGTEELLVKLNREDLLRKQRTFDNGSIPHQIHLGELHAILRRQEDFYPFLKDNREKIEKILTFRIPYYVGPLARGNSRFAWMTRKSEETITPWNFEEVVDKGASAQSFIERMTNFDKNLPNEKVLPKHSLLYEYFTVYNELTKVKYVTEGMRKPAFLSGEQKKAIVDLLFKTNRKVTVKQLKEDYFKKIECFDSVEISGVEDRFNASLGTYHDLLKIIKDKDFLDNEENEDILEDIVLTLTLFEDREMIEERLKTYAHLFDDKVMKQLKRRRYTGWGRLSRKLINGIRDKQSGKTILDFLKSDGFANRNFMQLIHDDSLTFKEDIQKAQVSGQGDSLHEHIANLAGSPAIKKGILQTVKVVDELVKVMGRHKPENIVIEMARENQTTQKGQKNSRERMKRIEEGIKELGSQILKEHPVENTQLQNEKLYLYYLQNGRDMYVDQELDINRLSDYDVDAIVPQSFLKDDSIDNKVLTRSDKNRGKSDNVPSEEVVKKMKNYWRQLLNAKLITQRKFDNLTKAERGGLSELDKAGFIKRQLVETRQITKHVAQILDSRMNTKYDENDKLIREVKVITLKSKLVSDFRKDFQFYKVREINNYHHAHDAYLNAVVGTALIKKYPKLESEFVYGDYKVYDVRKMIAKSEQEIGKATAKYFFYSNIMNFFKTEITLANGEIRKRPLIETNGETGEIVWDKGRDFATVRKVLSMPQVNIVKKTEVQTGGFSKESILPKRNSDKLIARKKDWDPKKYGGFDSPTVAYSVLVVAKVEKGKSKKLKSVKELLGITIMERSSFEKNPIDFLEAKGYKEVKKDLIIKLPKYSLFELENGRKRMLASAGELQKGNELALPSKYVNFLYLASHYEKLKGSPEDNEQKQLFVEQHKHYLDEIIEQISEFSKRVILADANLDKVLSAYNKHRDKPIREQAENIIHLFTLTNLGAPAAFKYFDTTIDRKRYTSTKEVLDATLIHQSITGLYETRIDLSQLGGDSGGSTNLSDIIEKETGKQLVIQESILMLPEEVEEVIGNKPESDILVHTAYDESTDENVMLLTSDAPEYKPWALVIQDSNGENKIKML

SEQ ID NO: 544 - protein, 1710 aa, synthetic construct
MSSETGPVAVDPTLRRRIEPHEFEVFFDPRELRKETCLLYEINWGGRHSIWRHTSQNTNKHVEVNFLEKFTTERYFCPNTRCSITWFLSWSPCGECSRAITEFLSRYPHVTLFIYIARLYHHADPRNRQGLRDLISSGVTIQIMTEQESGYCWRNFVNYSPSNEAHWPRYPHLWVRLYVLELYCIILGLPPCLNILRRKQPQLTFFTIALQSCHYQRLPPHILWATGLKSGSETPGTSESATPESDKKYSIGLAIGTNSVGWAVITDEYKVPSKKFKVLGNTDRHSIKKNLIGALLFDSGETAEATRLKRTARRRYTRRKNRICYLQEIFSNEMAKVDDSFFHRLEESFLVEEDKKHERHPIFGNIVDEVAYHEKYPTIYHLRKKLVDSTDKADLRLIYLALAHMIKFRGHFLIEGDLNPDNSDVDKLFIQLVQTYNQLFEENPINASGVDAKAILSARLSKSRRLENLIAQLPGEKKNGLFGNLIALSLGLTPNFKSNFDLAEDAKLQLSKDTYDDDLDNLLAQIGDQYADLFLAAKNLSDAILLSDILRVNTEITKAPLSASMIKRYDEHHQDLTLLKALVRQQLPEKYKEIFFDQSKNGYAGYIDGGASQEEFYKFIKPILEKMDGTEELLVKLNREDLLRKQRTFDNGSIPHQIHLGELHAILRRQEDFYPFLKDNREKIEKILTFRIPYYVGPLARGNSRFAWMTRKSEETITPWNFEEVVDKGASAQSFIERMTNFDKNLPNEKVLPKHSLLYEYFTVYNELTKVKYVTEGMRKPAFLSGEQKKAIVDLLFKTNRKVTVKQLKEDYFKKIECFDSVEISGVEDRFNASLGTYHDLLKIIKDKDFLDNEENEDILEDIVLTLTLFEDREMIEERLKTYAHLFDDKVMKQLKRRRYTGWGRLSRKLINGIRDKQSGKTILDFLKSDGFANRNFMQLIHDDSLTFKEDIQKAQVSGQGDSLHEHIANLAGSPAIKKGILQTVKVVDELVKVMGRHKPENIVIEMARENQTTQKGQKNSRERMKRIEEGIKELGSQILKEHPVENTQLQNEKLYLYYLQNGRDMYVDQELDINRLSDYDVDHIVPQSFLKDDSIDNKVLTRSDKNRGKSDNVPSEEVVKKMKNYWRQLLNAKLITQRKFDNLTKAERGGLSELDKAGFIKRQLVETRQITKHVAQILDSRMNTKYDENDKLIREVKVITLKSKLVSDFRKDFQFYKVREINNYHHAHDAYLNAVVGTALIKKYPKLESEFVYGDYKVYDVRKMIAKSEQEIGKATAKYFFYSNIMNFFKTEITLANGEIRKRPLIETNGETGEIVWDKGRDFATVRKVLSMPQVNIVKKTEVQTGGFSKESILPKRNSDKLIARKKDWDPKKYGGFDSPTVAYSVLVVAKVEKGKSKKLKSVKELLGITIMERSSFEKNPIDFLEAKGYKEVKKDLIIKLPKYSLFELENGRKRMLASAGELQKGNELALPSKYVNFLYLASHYEKLKGSPEDNEQKQLFVEQHKHYLDEIIEQISEFSKRVILADANLDKVLSAYNKHRDKPIREQAENIIHLFTLTNLGAPAAFKYFDTTIDRKRYTSTKEVLDATLIHQSITGLYETRIDLSQLGGDSGGSTNLSDIIEKETGKQLVIQESILMLPEEVEEVIGNKPESDILVHTAYDESTDENVMLLTSDAPEYKPWALVIQDSNGENKIKMLSGGSPKKKRKV

SEQ ID NO: 545 - protein, 1679 aa, synthetic construct
MTDAEYVRIHEKLDIYTFKKQFFNNKKSVSHRCYVLFELKRRGERRACFWGYAVNKPQSGTERGIHAEIFSIRKVEEYLRDNPGQFTINWYSSWSPCADCAEKILEWYNQELRGNGHTLKIWACKLYYEKNARNQIGLWNLRDNGVGLNVMVSEHYQCCRKIFIQSSHNQLNENRWLEKTLKRAEKRRSELSIMIQVKILHTTKSPAVSGSETPGTSESATPESDKKYSIGLAIGTNSVGWAVITDEYKVPSKKFKVLGNTDRHSIKKNLIGALLFDSGETAEATRLKRTARRRYTRRKNRICYLQEIFSNEMAKVDDSFFHRLEESFLVEEDKKHERHPIFGNIVDEVAYHEKYPTIYHLRKKLVDSTDKADLRLIYLALAHMIKFRGHFLIEGDLNPDNSDVDKLFIQLVQTYNQLFEENPINASGVDAKAILSARLSKSRRLENLIAQLPGEKKNGLFGNLIALSLGLTPNFKSNFDLAEDAKLQLSKDTYDDDLDNLLAQIGDQYADLFLAAKNLSDAILLSDILRVNTEITKAPLSASMIKRYDEHHQDLTLLKALVRQQLPEKYKEIFFDQSKNGYAGYIDGGASQEEFYKFIKPILEKMDGTEELLVKLNREDLLRKQRTFDNGSIPHQIHLGELHAILRRQEDFYPFLKDNREKIEKILTFRIPYYVGPLARGNSRFAWMTRKSEETITPWNFEEVVDKGASAQSFIERMTNFDKNLPNEKVLPKHSLLYEYFTVYNELTKVKYVTEGMRKPAFLSGEQKKAIVDLLFKTNRKVTVKQLKEDYFKKIECFDSVEISGVEDRFNASLGTYHDLLKIIKDKDFLDNEENEDILEDIVLTLTLFEDREMIEERLKTYAHLFDDKVMKQLKRRRYTGWGRLSRKLINGIRDKQSGKTILDFLKSDGFANRNFMQLIHDDSLTFKEDIQKAQVSGQGDSLHEHIANLAGSPAIKKGILQTVKVVDELVKVMGRHKPENIVIEMARENQTTQKGQKNSRERMKRIEEGIKELGSQILKEHPVENTQLQNEKLYLYYLQNGRDMYVDQELDINRLSDYDVDAIVPQSFLKDDSIDNKVLTRSDKNRGKSDNVPSEEVVKKMKNYWRQLLNAKLITQRKFDNLTKAERGGLSELDKAGFIKRQLVETRQITKHVAQILDSRMNTKYDENDKLIREVKVITLKSKLVSDFRKDFQFYKVREINNYHHAHDAYLNAVVGTALIKKYPKLESEFVYGDYKVYDVRKMIAKSEQEIGKATAKYFFYSNIMNFFKTEITLANGEIRKRPLIETNGETGEIVWDKGRDFATVRKVLSMPQVNIVKKTEVQTGGFSKESILPKRNSDKLIARKKDWDPKKYGGFDSPTVAYSVLVVAKVEKGKSKKLKSVKELLGITIMERSSFEKNPIDFLEAKGYKEVKKDLIIKLPKYSLFELENGRKRMLASAGELQKGNELALPSKYVNFLYLASHYEKLKGSPEDNEQKQLFVEQHKHYLDEIIEQISEFSKRVILADANLDKVLSAYNKHRDKPIREQAENIIHLFTLTNLGAPAAFKYFDTTIDRKRYTSTKEVLDATLIHQSITGLYETRIDLSQLGGDSGGSMTNLSDIIEKETGKQLVIQESILMLPEEVEEVIGNKPESDILVHTAYDESTDENVMLLTSDAPEYKPWALVIQDSNGENKIKML

SEQ ID NO: 546 - protein, 1689 aa, synthetic construct
MTDAEYVRIHEKLDIYTFKKQFFNNKKSVSHRCYVLFELKRRGERRACFWGYAVNKPQSGTERGIHAEIFSIRKVEEYLRDNPGQFTINWYSSWSPCADCAEKILEWYNQELRGNGHTLKIWACKLYYEKNARNQIGLWNLRDNGVGLNVMVSEHYQCCRKIFIQSSHNQLNENRWLEKTLKRAEKRRSELSIMIQVKILHTTKSPAVSGSETPGTSESATPESDKKYSIGLAIGTNSVGWAVITDEYKVPSKKFKVLGNTDRHSIKKNLIGALLFDSGETAEATRLKRTARRRYTRRKNRICYLQEIFSNEMAKVDDSFFHRLEESFLVEEDKKHERHPIFGNIVDEVAYHEKYPTIYHLRKKLVDSTDKADLRLIYLALAHMIKFRGHFLIEGDLNPDNSDVDKLFIQLVQTYNQLFEENPINASGVDAKAILSARLSKSRRLENLIAQLPGEKKNGLFGNLIALSLGLTPNFKSNFDLAEDAKLQLSKDTYDDDLDNLLAQIGDQYADLFLAAKNLSDAILLSDILRVNTEITKAPLSASMIKRYDEHHQDLTLLKALVRQQLPEKYKEIFFDQSKNGYAGYIDGGASQEEFYKFIKPILEKMDGTEELLVKLNREDLLRKQRTFDNGSIPHQIHLGELHAILRRQEDFYPFLKDNREKIEKILTFRIPYYVGPLARGNSRFAWMTRKSEETITPWNFEEVVDKGASAQSFIERMTNFDKNLPNEKVLPKHSLLYEYFTVYNELTKVKYVTEGMRKPAFLSGEQKKAIVDLLFKTNRKVTVKQLKEDYFKKIECFDSVEISGVEDRFNASLGTYHDLLKIIKDKDFLDNEENEDILEDIVLTLTLFEDREMIEERLKTYAHLFDDKVMKQLKRRRYTGWGRLSRKLINGIRDKQSGKTILDFLKSDGFANRNFMQLIHDDSLTFKEDIQKAQVSGQGDSLHEHIANLAGSPAIKKGILQTVKVVDELVKVMGRHKPENIVIEMARENQTTQKGQKNSRERMKRIEEGIKELGSQILKEHPVENTQLQNEKLYLYYLQNGRDMYVDQELDINRLSDYDVDHIVPQSFLKDDSIDNKVLTRSDKNRGKSDNVPSEEVVKKMKNYWRQLLNAKLITQRKFDNLTKAERGGLSELDKAGFIKRQLVETRQITKHVAQILDSRMNTKYDENDKLIREVKVITLKSKLVSDFRKDFQFYKVREINNYHHAHDAYLNAVVGTALIKKYPKLESEFVYGDYKVYDVRKMIAKSEQEIGKATAKYFFYSNIMNFFKTEITLANGEIRKRPLIETNGETGEIVWDKGRDFATVRKVLSMPQVNIVKKTEVQTGGFSKESILPKRNSDKLIARKKDWDPKKYGGFDSPTVAYSVLVVAKVEKGKSKKLKSVKELLGITIMERSSFEKNPIDFLEAKGYKEVKKDLIIKLPKYSLFELENGRKRMLASAGELQKGNELALPSKYVNFLYLASHYEKLKGSPEDNEQKQLFVEQHKHYLDEIIEQISEFSKRVILADANLDKVLSAYNKHRDKPIREQAENIIHLFTLTNLGAPAAFKYFDTTIDRKRYTSTKEVLDATLIHQSITGLYETRIDLSQLGGDSGGSTNLSDIIEKETGKQLVIQESILMLPEEVEEVIGNKPESDILVHTAYDESTDENVMLLTSDAPEYKPWALVIQDSNGENKIKMLSGGSPKKKRKV

SEQ ID NO: 547 - protein, 1655 aa, synthetic construct
MDPPTFTFNFNNEPWVRGRHETYLCYEVERMHNDTWVLLNQRRGFLCNQAPHKHGFLEGRHAELCFLDVIPFWKLDLDQDYRVTCFTSWSPCFSCAQEMAKFISKNKHVSLCIFTARIYDDQGRCQEGLRTLAEAGAKISIMTYSEFKHCWDTFVDHQGCPFQPWDGLDEHSQDLSGRLRAILQSGSETPGTSESATPESDKKYSIGLAIGTNSVGWAVITDEYKVPSKKFKVLGNTDRHSIKKNLIGALLFDSGETAEATRLKRTARRRYTRRKNRICYLQEIFSNEMAKVDDSFFHRLEESFLVEEDKKHERHPIFGNIVDEVAYHEKYPTIYHLRKKLVDSTDKADLRLIYLALAHMIKFRGHFLIEGDLNPDNSDVDKLFIQLVQTYNQLFEENPINASGVDAKAILSARLSKSRRLENLIAQLPGEKKNGLFGNLIALSLGLTPNFKSNFDLAEDAKLQLSKDTYDDDLDNLLAQIGDQYADLFLAAKNLSDAILLSDILRVNTEITKAPLSASMIKRYDEHHQDLTLLKALVRQQLPEKYKEIFFDQSKNGYAGYIDGGASQEEFYKFIKPILEKMDGTEELLVKLNREDLLRKQRTFDNGSIPHQIHLGELHAILRRQEDFYPFLKDNREKIEKILTFRIPYYVGPLARGNSRFAWMTRKSEETITPWNFEEVVDKGASAQSFIERMTNFDKNLPNEKVLPKHSLLYEYFTVYNELTKVKYVTEGMRKPAFLSGEQKKAIVDLLFKTNRKVTVKQLKEDYFKKIECFDSVEISGVEDRFNASLGTYHDLLKIIKDKDFLDNEENEDILEDIVLTLTLFEDREMIEERLKTYAHLFDDKVMKQLKRRRYTGWGRLSRKLINGIRDKQSGKTILDFLKSDGFANRNFMQLIHDDSLTFKEDIQKAQVSGQGDSLHEHIANLAGSPAIKKGILQTVKVVDELVKVMGRHKPENIVIEMARENQTTQKGQKNSRERMKRIEEGIKELGSQILKEHPVENTQLQNEKLYLYYLQNGRDMYVDQELDINRLSDYDVDAIVPQSFLKDDSIDNKVLTRSDKNRGKSDNVPSEEVVKKMKNYWRQLLNAKLITQRKFDNLTKAERGGLSELDKAGFIKRQLVETRQITKHVAQILDSRMNTKYDENDKLIREVKVITLKSKLVSDFRKDFQFYKVREINNYHHAHDAYLNAVVGTALIKKYPKLESEFVYGDYKVYDVRKMIAKSEQEIGKATAKYFFYSNIMNFFKTEITLANGEIRKRPLIETNGETGEIVWDKGRDFATVRKVLSMPQVNIVKKTEVQTGGFSKESILPKRNSDKLIARKKDWDPKKYGGFDSPTVAYSVLVVAKVEKGKSKKLKSVKELLGITIMERSSFEKNPIDFLEAKGYKEVKKDLIIKLPKYSLFELENGRKRMLASAGELQKGNELALPSKYVNFLYLASHYEKLKGSPEDNEQKQLFVEQHKHYLDEIIEQISEFSKRVILADANLDKVLSAYNKHRDKPIREQAENIIHLFTLTNLGAPAAFKYFDTTIDRKRYTSTKEVLDATLIHQSITGLYETRIDLSQLGGDSGGSMTNLSDIIEKETGKQLVIQESILMLPEEVEEVIGNKPESDILVHTAYDESTDENVMLLTSDAPEYKPWALVIQDSNGENKIKML

SEQ ID NO: 548 - protein, 1665 aa, synthetic construct
MDPPTFTFNFNNEPWVRGRHETYLCYEVERMHNDTWVLLNQRRGFLCNQAPHKHGFLEGRHAELCFLDVIPFWKLDLDQDYRVTCFTSWSPCFSCAQEMAKFISKNKHVSLCIFTARIYDDQGRCQEGLRTLAEAGAKISIMTYSEFKHCWDTFVDHQGCPFQPWDGLDEHSQDLSGRLRAILQSGSETPGTSESATPESDKKYSIGLAIGTNSVGWAVITDEYKVPSKKFKVLGNTDRHSIKKNLIGALLFDSGETAEATRLKRTARRRYTRRKNRICYLQEIFSNEMAKVDDSFFHRLEESFLVEEDKKHERHPIFGNIVDEVAYHEKYPTIYHLRKKLVDSTDKADLRLIYLALAHMIKFRGHFLIEGDLNPDNSDVDKLFIQLVQTYNQLFEENPINASGVDAKAILSARLSKSRRLENLIAQLPGEKKNGLFGNLIALSLGLTPNFKSNFDLAEDAKLQLSKDTYDDDLDNLLAQIGDQYADLFLAAKNLSDAILLSDILRVNTEITKAPLSASMIKRYDEHHQDLTLLKALVRQQLPEKYKEIFFDQSKNGYAGYIDGGASQEEFYKFIKPILEKMDGTEELLVKLNREDLLRKQRTFDNGSIPHQIHLGELHAILRRQEDFYPFLKDNREKIEKILTFRIPYYVGPLARGNSRFAWMTRKSEETITPWNFEEVVDKGASAQSFIERMTNFDKNLPNEKVLPKHSLLYEYFTVYNELTKVKYVTEGMRKPAFLSGEQKKAIVDLLFKTNRKVTVKQLKEDYFKKIECFDSVEISGVEDRFNASLGTYHDLLKIIKDKDFLDNEENEDILEDIVLTLTLFEDREMIEERLKTYAHLFDDKVMKQLKRRRYTGWGRLSRKLINGIRDKQSGKTILDFLKSDGFANRNFMQLIHDDSLTFKEDIQKAQVSGQGDSLHEHIANLAGSPAIKKGILQTVKVVDELVKVMGRHKPENIVIEMARENQTTQKGQKNSRERMKRIEEGIKELGSQILKEHPVENTQLQNEKLYLYYLQNGRDMYVDQELDINRLSDYDVDHIVPQSFLKDDSIDNKVLTRSDKNRGKSDNVPSEEVVKKMKNYWRQLLNAKLITQRKFDNLTKAERGGLSELDKAGFIKRQLVETRQITKHVAQILDSRMNTKYDENDKLIREVKVITLKSKLVSDFRKDFQFYKVREINNYHHAHDAYLNAVVGTALIKKYPKLESEFVYGDYKVYDVRKMIAKSEQEIGKATAKYFFYSNIMNFFKTEITLANGEIRKRPLIETNGETGEIVWDKGRDFATVRKVLSMPQVNIVKKTEVQTGGFSKESILPKRNSDKLIARKKDWDPKKYGGFDSPTVAYSVLVVAKVEKGKSKKLKSVKELLGITIMERSSFEKNPIDFLEAKGYKEVKKDLIIKLPKYSLFELENGRKRMLASAGELQKGNELALPSKYVNFLYLASHYEKLKGSPEDNEQKQLFVEQHKHYLDEIIEQISEFSKRVILADANLDKVLSAYNKHRDKPIREQAENIIHLFTLTNLGAPAAFKYFDTTIDRKRYTSTKEVLDATLIHQSITGLYETRIDLSQLGGDSGGSTNLSDIIEKETGKQLVIQESILMLPEEVEEVIGNKPESDILVHTAYDESTDENVMLLTSDAPEYKPWALVIQDSNGENKIKMLSGGSPKKKRKV

SEQ ID NO: 549 - protein, 1665 aa, synthetic construct
MDPPTFTFNFNNEPWVRGRHETYLCYEVERMHNDTWVLLNQRRGFLCNQAPHKHGFLEGRHAELCFLDVIPFWKLDLDQDYRVTCFTSWSPCFSCAQEMAKFISKNKHVSLCIFTARIYRRQGRCQEGLRTLAEAGAKISIMTYSEFKHCWDTFVDHQGCPFQPWDGLDEHSQDLSGRLRAILQSGSETPGTSESATPESDKKYSIGLAIGTNSVGWAVITDEYKVPSKKFKVLGNTDRHSIKKNLIGALLFDSGETAEATRLKRTARRRYTRRKNRICYLQEIFSNEMAKVDDSFFHRLEESFLVEEDKKHERHPIFGNIVDEVAYHEKYPTIYHLRKKLVDSTDKADLRLIYLALAHMIKFRGHFLIEGDLNPDNSDVDKLFIQLVQTYNQLFEENPINASGVDAKAILSARLSKSRRLENLIAQLPGEKKNGLFGNLIALSLGLTPNFKSNFDLAEDAKLQLSKDTYDDDLDNLLAQIGDQYADLFLAAKNLSDAILLSDILRVNTEITKAPLSASMIKRYDEHHQDLTLLKALVRQQLPEKYKEIFFDQSKNGYAGYIDGGASQEEFYKFIKPILEKMDGTEELLVKLNREDLLRKQRTFDNGSIPHQIHLGELHAILRRQEDFYPFLKDNREKIEKILTFRIPYYVGPLARGNSRFAWMTRKSEETITPWNFEEVVDKGASAQSFIERMTNFDKNLPNEKVLPKHSLLYEYFTVYNELTKVKYVTEGMRKPAFLSGEQKKAIVDLLFKTNRKVTVKQLKEDYFKKIECFDSVEISGVEDRFNASLGTYHDLLKIIKDKDFLDNEENEDILEDIVLTLTLFEDREMIEERLKTYAHLFDDKVMKQLKRRRYTGWGRLSRKLINGIRDKQSGKTILDFLKSDGFANRNFMQLIHDDSLTFKEDIQKAQVSGQGDSLHEHIANLAGSPAIKKGILQTVKVVDELVKVMGRHKPENIVIEMARENQTTQKGQKNSRERMKRIEEGIKELGSQILKEHPVENTQLQNEKLYLYYLQNGRDMYVDQELDINRLSDYDVDHIVPQSFLKDDSIDNKVLTRSDKNRGKSDNVPSEEVVKKMKNYWRQLLNAKLITQRKFDNLTKAERGGLSELDKAGFIKRQLVETRQITKHVAQILDSRMNTKYDENDKLIREVKVITLKSKLVSDFRKDFQFYKVREINNYHHAHDAYLNAVVGTALIKKYPKLESEFVYGDYKVYDVRKMIAKSEQEIGKATAKYFFYSNIMNFFKTEITLANGEIRKRPLIETNGETGEIVWDKGRDFATVRKVLSMPQVNIVKKTEVQTGGFSKESILPKRNSDKLIARKKDWDPKKYGGFDSPTVAYSVLVVAKVEKGKSKKLKSVKELLGITIMERSSFEKNPIDFLEAKGYKEVKKDLIIKLPKYSLFELENGRKRMLASAGELQKGNELALPSKYVNFLYLASHYEKLKGSPEDNEQKQLFVEQHKHYLDEIIEQISEFSKRVILADANLDKVLSAYNKHRDKPIREQAENIIHLFTLTNLGAPAAFKYFDTTIDRKRYTSTKEVLDATLIHQSITGLYETRIDLSQLGGDSGGSTNLSDIIEKETGKQLVIQESILMLPEEVEEVIGNKPESDILVHTAYDESTDENVMLLTSDAPEYKPWALVIQDSNGENKIKMLSGGSPKKKRKV

SEQ ID NO: 550 - protein, 1710 aa, synthetic construct
MSSETGPVAVDPTLRRRIEPHEFEVFFDPRELRKETCLLYEINWGGRHSIWRHTSQNTNKHVEVNFIEKFTTERYFCPNTRCSITWFLSWSPCGECSRAITEFLSRYPHVTLFIYIARLYHHADPRNRQGLRDLISSGVTIQIMTEQESGYCWRNFVNYSPSNEAHWPRYPHLWVRLYVLELYCIILGLPPCLNILRRKQPQLTFFTIALQSCHYQRLPPHILWATGLKSGSETPGTSESATPESDKKYSIGLAIGTNSVGWAVITDEYKVPSKKFKVLGNTDRHSIKKNLIGALLFDSGETAEATRLKRTARRRYTRRKNRICYLQEIFSNEMAKVDDSFFHRLEESFLVEEDKKHERHPIFGNIVDEVAYHEKYPTIYHLRKKLVDSTDKADLRLIYLALAHMIKFRGHFLIEGDLNPDNSDVDKLFIQLVQTYNQLFEENPINASGVDAKAILSARLSKSRRLENLIAQLPGEKKNGLFGNLIALSLGLTPNFKSNFDLAEDAKLQLSKDTYDDDLDNLLAQIGDQYADLFLAAKNLSDAILLSDILRVNTEITKAPLSASMIKRYDEHHQDLTLLKALVRQQLPEKYKEIFFDQSKNGYAGYIDGGASQEEFYKFIKPILEKMDGTEELLVKLNREDLLRKQRTFDNGSIPHQIHLGELHAILRRQEDFYPFLKDNREKIEKILTFRIPYYVGPLARGNSRFAWMTRKSEETITPWNFEEVVDKGASAQSFIERMTNFDKNLPNEKVLPKHSLLYEYFTVYNELTKVKYVTEGMRKPAFLSGEQKKAIVDLLFKTNRKVTVKQLKEDYFKKIECFDSVEISGVEDRFNASLGTYHDLLKIIKDKDFLDNEENEDILEDIVLTLTLFEDREMIEERLKTYAHLFDDKVMKQLKRRRYTGWGRLSRKLINGIRDKQSGKTILDFLKSDGFANRNFMQLIHDDSLTFKEDIQKAQVSGQGDSLHEHIANLAGSPAIKKGILQTVKVVDELVKVMGRHKPENIVIEMARENQTTQKGQKNSRERMKRIEEGIKELGSQILKEHPVENTQLQNEKLYLYYLQNGRDMYVDQELDINRLSDYDVDHIVPQSFLKDDSIDNKVLTRSDKNRGKSDNVPSEEVVKKMKNYWRQLLNAKLITQRKFDNLTKAERGGLSELDKAGFIKRQLVETRQITKHVAQILDSRMNTKYDENDKLIREVKVITLKSKLVSDFRKDFQFYKVREINNYHHAHDAYLNAVVGTALIKKYPKLESEFVYGDYKVYDVRKMIAKSEQEIGKATAKYFFYSNIMNFFKTEITLANGEIRKRPLIETNGETGEIVWDKGRDFATVRKVLSMPQVNIVKKTEVQTGGFSKESILPKRNSDKLIARKKDWDPKKYGGFDSPTVAYSVLVVAKVEKGKSKKLKSVKELLGITIMERSSFEKNPIDFLEAKGYKEVKKDLIIKLPKYSLFELENGRKRMLASAGELQKGNELALPSKYVNFLYLASHYEKLKGSPEDNEQKQLFVEQHKHYLDEIIEQISEFSKRVILADANLDKVLSAYNKHRDKPIREQAENIIHLFTLTNLGAPAAFKYFDTTIDRKRYTSTKEVLDATLIHQSITGLYETRIDLSQLGGDSGGSTNLSDIIEKETGKQLVIQESILMLPEEVEEVIGNKPESDILVHTAYDESTDENVMLLTSDAPEYKPWALVIQDSNGENKIKMLSGGSPKKKRKV

SEQ ID NO: 551-559 - skipped (9 entries)

SEQ ID NO: 560 - protein, 1561 aa, synthetic construct
MSEVEFSHEYWMRHALTLAKRAWDEREVPVGAVLVHNNRVIGEGWNRPIGRHDPTAHAEIMALRQGGLVMQNYRLIDATLYVTLEPCVMCAGAMIHSRIGRVVFGARDAKTGAAGSLMDVLHHPGMNHRVEITEGILADECAALLSDFFRMRRQEIKAQKKAQSSTDSGSETPGTSESATPESDKKYSIGLAIGTNSVGWAVITDEYKVPSKKFKVLGNTDRHSIKKNLIGALLFDSGETAEATRLKRTARRRYTRRKNRICYLQEIFSNEMAKVDDSFFHRLEESFLVEEDKKHERHPIFGNIVDEVAYHEKYPTIYHLRKKLVDSTDKADLRLIYLALAHMIKFRGHFLIEGDLNPDNSDVDKLFIQLVQTYNQLFEENPINASGVDAKAILSARLSKSRRLENLIAQLPGEKKNGLFGNLIALSLGLTPNFKSNFDLAEDAKLQLSKDTYDDDLDNLLAQIGDQYADLFLAAKNLSDAILLSDILRVNTEITKAPLSASMIKRYDEHHQDLTLLKALVRQQLPEKYKEIFFDQSKNGYAGYIDGGASQEEFYKFIKPILEKMDGTEELLVKLNREDLLRKQRTFDNGSIPHQIHLGELHAILRRQEDFYPFLKDNREKIEKILTFRIPYYVGPLARGNSRFAWMTRKSEETITPWNFEEVVDKGASAQSFIERMTNFDKNLPNEKVLPKHSLLYEYFTVYNELTKVKYVTEGMRKPAFLSGEQKKAIVDLLFKTNRKVTVKQLKEDYFKKIECFDSVEISGVEDRFNASLGTYHDLLKIIKDKDFLDNEENEDILEDIVLTLTLFEDREMIEERLKTYAHLFDDKVMKQLKRRRYTGWGRLSRKLINGIRDKQSGKTILDFLKSDGFANRNFMQLIHDDSLTFKEDIQKAQVSGQGDSLHEHIANLAGSPAIKKGILQTVKVVDELVKVMGRHKPENIVIEMARENQTTQKGQKNSRERMKRIEEGIKELGSQILKEHPVENTQLQNEKLYLYYLQNGRDMYVDQELDINRLSDYDVDHIVPQSFLKDDSIDNKVLTRSDKNRGKSDNVPSEEVVKKMKNYWRQLLNAKLITQRKFDNLTKAERGGLSELDKAGFIKRQLVETRQITKHVAQILDSRMNTKYDENDKLIREVKVITLKSKLVSDFRKDFQFYKVREINNYHHAHDAYLNAVVGTALIKKYPKLESEFVYGDYKVYDVRKMIAKSEQEIGKATAKYFFYSNIMNFFKTEITLANGEIRKRPLIETNGETGEIVWDKGRDFATVRKVLSMPQVNIVKKTEVQTGGFSKESILPKRNSDKLIARKKDWDPKKYGGFDSPTVAYSVLVVAKVEKGKSKKLKSVKELLGITIMERSSFEKNPIDFLEAKGYKEVKKDLIIKLPKYSLFELENGRKRMLASAGELQKGNELALPSKYVNFLYLASHYEKLKGSPEDNEQKQLFVEQHKHYLDEIIEQISEFSKRVILADANLDKVLSAYNKHRDKPIREQAENIIHLFTLTNLGAPAAFKYFDTTIDRKRYTSTKEVLDATLIHQSITGLYETRIDLSQLGGDSGGSPKKKRKV

SEQ ID NO: 561 - protein, 1561 aa, synthetic construct
MSEVEFSHEYWMRHALTLAKRAWDEREVPVGAVLVHNNRVIGEGWNRPIGRHDPTAHAEIMALRQGGLVMQNYRLIDATLYVTLEPCVMCAGAMIHSRIGRVVFGARNAKTGAAGSLMDVLHHPGMNHRVEITEGILADECAALLSDFFRMRRQEIKAQKKAQSSTDSGSETPGTSESATPESDKKYSIGLAIGTNSVGWAVITDEYKVPSKKFKVLGNTDRHSIKKNLIGALLFDSGETAEATRLKRTARRRYTRRKNRICYLQEIFSNEMAKVDDSFFHRLEESFLVEEDKKHERHPIFGNIVDEVAYHEKYPTIYHLRKKLVDSTDKADLRLIYLALAHMIKFRGHFLIEGDLNPDNSDVDKLFIQLVQTYNQLFEENPINASGVDAKAILSARLSKSRRLENLIAQLPGEKKNGLFGNLIALSLGLTPNFKSNFDLAEDAKLQLSKDTYDDDLDNLLAQIGDQYADLFLAAKNLSDAILLSDILRVNTEITKAPLSASMIKRYDEHHQDLTLLKALVRQQLPEKYKEIFFDQSKNGYAGYIDGGASQEEFYKFIKPILEKMDGTEELLVKLNREDLLRKQRTFDNGSIPHQIHLGELHAILRRQEDFYPFLKDNREKIEKILTFRIPYYVGPLARGNSRFAWMTRKSEETITPWNFEEVVDKGASAQSFIERMTNFDKNLPNEKVLPKHSLLYEYFTVYNELTKVKYVTEGMRKPAFLSGEQKKAIVDLLFKTNRKVTVKQLKEDYFKKIECFDSVEISGVEDRFNASLGTYHDLLKIIKDKDFLDNEENEDILEDIVLTLTLFEDREMIEERLKTYAHLFDDKVMKQLKRRRYTGWGRLSRKLINGIRDKQSGKTILDFLKSDGFANRNFMQLIHDDSLTFKEDIQKAQVSGQGDSLHEHIANLAGSPAIKKGILQTVKVVDELVKVMGRHKPENIVIEMARENQTTQKGQKNSRERMKRIEEGIKELGSQILKEHPVENTQLQNEKLYLYYLQNGRDMYVDQELDINRLSDYDVDHIVPQSFLKDDSIDNKVLTRSDKNRGKSDNVPSEEVVKKMKNYWRQLLNAKLITQRKFDNLTKAERGGLSELDKAGFIKRQLVETRQITKHVAQILDSRMNTKYDENDKLIREVKVITLKSKLVSDFRKDFQFYKVREINNYHHAHDAYLNAVVGTALIKKYPKLESEFVYGDYKVYDVRKMIAKSEQEIGKATAKYFFYSNIMNFFKTEITLANGEIRKRPLIETNGETGEIVWDKGRDFATVRKVLSMPQVNIVKKTEVQTGGFSKESILPKRNSDKLIARKKDWDPKKYGGFDSPTVAYSVLVVAKVEKGKSKKLKSVKELLGITIMERSSFEKNPIDFLEAKGYKEVKKDLIIKLPKYSLFELENGRKRMLASAGELQKGNELALPSKYVNFLYLASHYEKLKGSPEDNEQKQLFVEQHKHYLDEIIEQISEFSKRVILADANLDKVLSAYNKHRDKPIREQAENIIHLFTLTNLGAPAAFKYFDTTIDRKRYTSTKEVLDATLIHQSITGLYETRIDLSQLGGDSGGSPKKKRKV

SEQ ID NO: 562 - protein, 1561 aa, synthetic construct
MSEVEFSHEYWMRHALTLAKRAWDEREVPVGAVLVHNNRVIGEGWNRPIGRHDPTAHAEIMALRQGGLVMQNYRLIDATLYVTLEPCVMCAGAMIHSRIGRVVFGARGAKTGAAGSLMDVLHHPGMNHRVEITEGILADECAALLSDFFRMRRQEIKAQKKAQSSTDSGSETPGTSESATPESDKKYSIGLAIGTNSVGWAVITDEYKVPSKKFKVLGNTDRHSIKKNLIGALLFDSGETAEATRLKRTARRRYTRRKNRICYLQEIFSNEMAKVDDSFFHRLEESFLVEEDKKHERHPIFGNIVDEVAYHEKYPTIYHLRKKLVDSTDKADLRLIYLALAHMIKFRGHFLIEGDLNPDNSDVDKLFIQLVQTYNQLFEENPINASGVDAKAILSARLSKSRRLENLIAQLPGEKKNGLFGNLIALSLGLTPNFKSNFDLAEDAKLQLSKDTYDDDLDNLLAQIGDQYADLFLAAKNLSDAILLSDILRVNTEITKAPLSASMIKRYDEHHQDLTLLKALVRQQLPEKYKEIFFDQSKNGYAGYIDGGASQEEFYKFIKPILEKMDGTEELLVKLNREDLLRKQRTFDNGSIPHQIHLGELHAILRRQEDFYPFLKDNREKIEKILTFRIPYYVGPLARGNSRFAWMTRKSEETITPWNFEEVVDKGASAQSFIERMTNFDKNLPNEKVLPKHSLLYEYFTVYNELTKVKYVTEGMRKPAFLSGEQKKAIVDLLFKTNRKVTVKQLKEDYFKKIECFDSVEISGVEDRFNASLGTYHDLLKIIKDKDFLDNEENEDILEDIVLTLTLFEDREMIEERLKTYAHLFDDKVMKQLKRRRYTGWGRLSRKLINGIRDKQSGKTILDFLKSDGFANRNFMQLIHDDSLTFKEDIQKAQVSGQGDSLHEHIANLAGSPAIKKGILQTVKVVDELVKVMGRHKPENIVIEMARENQTTQKGQKNSRERMKRIEEGIKELGSQILKEHPVENTQLQNEKLYLYYLQNGRDMYVDQELDINRLSDYDVDHIVPQSFLKDDSIDNKVLTRSDKNRGKSDNVPSEEVVKKMKNYWRQLLNAKLITQRKFDNLTKAERGGLSELDKAGFIKRQLVETRQITKHVAQILDSRMNTKYDENDKLIREVKVITLKSKLVSDFRKDFQFYKVREINNYHHAHDAYLNAVVGTALIKKYPKLESEFVYGDYKVYDVRKMIAKSEQEIGKATAKYFFYSNIMNFFKTEITLANGEIRKRPLIETNGETGEIVWDKGRDFATVRKVLSMPQVNIVKKTEVQTGGFSKESILPKRNSDKLIARKKDWDPKKYGGFDSPTVAYSVLVVAKVEKGKSKKLKSVKELLGITIMERSSFEKNPIDFLEAKGYKEVKKDLIIKLPKYSLFELENGRKRMLASAGELQKGNELALPSKYVNFLYLASHYEKLKGSPEDNEQKQLFVEQHKHYLDEIIEQISEFSKRVILADANLDKVLSAYNKHRDKPIREQAENIIHLFTLTNLGAPAAFKYFDTTIDRKRYTSTKEVLDATLIHQSITGLYETRIDLSQLGGDSGGSPKKKRKV

SEQ ID NO: 563 - protein, 1561 aa, synthetic construct
MSEVEFSHEYWMRHALTLAKRAWDEREVPVGAVLVHNNRVIGEGWNRPIGRHDPTAHAEIMALRQGGLVMQNYRLIDATLYVTLEPCVMCAGAMIHSRIGRVVFGARVAKTGAAGSLMDVLHHPGMNHRVEITEGILADECAALLSDFFRMRRQEIKAQKKAQSSTDSGSETPGTSESATPESDKKYSIGLAIGTNSVGWAVITDEYKVPSKKFKVLGNTDRHSIKKNLIGALLFDSGETAEATRLKRTARRRYTRRKNRICYLQEIFSNEMAKVDDSFFHRLEESFLVEEDKKHERHPIFGNIVDEVAYHEKYPTIYHLRKKLVDSTDKADLRLIYLALAHMIKFRGHFLIEGDLNPDNSDVDKLFIQLVQTYNQLFEENPINASGVDAKAILSARLSKSRRLENLIAQLPGEKKNGLFGNLIALSLGLTPNFKSNFDLAEDAKLQLSKDTYDDDLDNLLAQIGDQYADLFLAAKNLSDAILLSDILRVNTEITKAPLSASMIKRYDEHHQDLTLLKALVRQQLPEKYKEIFFDQSKNGYAGYIDGGASQEEFYKFIKPILEKMDGTEELLVKLNREDLLRKQRTFDNGSIPHQIHLGELHAILRRQEDFYPFLKDNREKIEKILTFRIPYYVGPLARGNSRFAWMTRKSEETITPWNFEEVVDKGASAQSFIERMTNFDKNLPNEKVLPKHSLLYEYFTVYNELTKVKYVTEGMRKPAFLSGEQKKAIVDLLFKTNRKVTVKQLKEDYFKKIECFDSVEISGVEDRFNASLGTYHDLLKIIKDKDFLDNEENEDILEDIVLTLTLFEDREMIEERLKTYAHLFDDKVMKQLKRRRYTGWGRLSRKLINGIRDKQSGKTILDFLKSDGFANRNFMQLIHDDSLTFKEDIQKAQVSGQGDSLHEHIANLAGSPAIKKGILQTVKVVDELVKVMGRHKPENIVIEMARENQTTQKGQKNSRERMKRIEEGIKELGSQILKEHPVENTQLQNEKLYLYYLQNGRDMYVDQELDINRLSDYDVDHIVPQSFLKDDSIDNKVLTRSDKNRGKSDNVPSEEVVKKMKNYWRQLLNAKLITQRKFDNLTKAERGGLSELDKAGFIKRQLVETRQITKHVAQILDSRMNTKYDENDKLIREVKVITLKSKLVSDFRKDFQFYKVREINNYHHAHDAYLNAVVGTALIKKYPKLESEFVYGDYKVYDVRKMIAKSEQEIGKATAKYFFYSNIMNFFKTEITLANGEIRKRPLIETNGETGEIVWDKGRDFATVRKVLSMPQVNIVKKTEVQTGGFSKESILPKRNSDKLIARKKDWDPKKYGGFDSPTVAYSVLVVAKVEKGKSKKLKSVKELLGITIMERSSFEKNPIDFLEAKGYKEVKKDLIIKLPKYSLFELENGRKRMLASAGELQKGNELALPSKYVNFLYLASHYEKLKGSPEDNEQKQLFVEQHKHYLDEIIEQISEFSKRVILADANLDKVLSAYNKHRDKPIREQAENIIHLFTLTNLGAPAAFKYFDTTIDRKRYTSTKEVLDATLIHQSITGLYETRIDLSQLGGDSGGSPKKKRKV

SEQ ID NO: 564 - protein, 1550 aa, synthetic construct
MSEVEFSYEYWMRHALTLAKRAWDEREVPVGAVLVHNNRVIGEGWNRPIGRHDPTAHAEIMALRQGGLVMQNYRLIDATLYVTLEPCVMCAGAMIHSRIGRVVFGARNAKTGAAGSLMDVLHHPGMSHRVEITEGILADECAALLSDFFRMRRQEIKAQKKAQSSTDSGSETPGTSESATPESDKKYSIGLAIGTNSVGWAVITDEYKVPSKKFKVLGNTDRHSIKKNLIGALLFDSGETAEATRLKRTARRRYTRRKNRICYLQEIFSNEMAKVDDSFFHRLEESFLVEEDKKHERHPIFGNIVDEVAYHEKYPTIYHLRKKLVDSTDKADLRLIYLALAHMIKFRGHFLIEGDLNPDNSDVDKLFIQLVQTYNQLFEENPINASGVDAKAILSARLSKSRRLENLIAQLPGEKKNGLFGNLIALSLGLTPNFKSNFDLAEDAKLQLSKDTYDDDLDNLLAQIGDQYADLFLAAKNLSDAILLSDILRVNTEITKAPLSASMIKRYDEHHQDLTLLKALVRQQLPEKYKEIFFDQSKNGYAGYIDGGASQEEFYKFIKPILEKMDGTEELLVKLNREDLLRKQRTFDNGSIPHQIHLGELHAILRRQEDFYPFLKDNREKIEKILTFRIPYYVGPLARGNSRFAWMTRKSEETITPWNFEEVVDKGASAQSFIERMTNFDKNLPNEKVLPKHSLLYEYFTVYNELTKVKYVTEGMRKPAFLSGEQKKAIVDLLFKTNRKVTVKQLKEDYFKKIECFDSVEISGVEDRFNASLGTYHDLLKIIKDKDFLDNEENEDILEDIVLTLTLFEDREMIEERLKTYAHLFDDKVMKQLKRRRYTGWGRLSRKLINGIRDKQSGKTILDFLKSDGFANRNFMQLIHDDSLTFKEDIQKAQVSGQGDSLHEHIANLAGSPAIKKGILQTVKVVDELVKVMGRHKPENIVIEMARENQTTQKGQKNSRERMKRIEEGIKELGSQILKEHPVENTQLQNEKLYLYYLQNGRDMYVDQELDINRLSDYDVDAIVPQSFLKDDSIDNKVLTRSDKNRGKSDNVPSEEVVKKMKNYWRQLLNAKLITQRKFDNLTKAERGGLSELDKAGFIKRQLVETRQITKHVAQILDSRMNTKYDENDKLIREVKVITLKSKLVSDFRKDFQFYKVREINNYHHAHDAYLNAVVGTALIKKYPKLESEFVYGDYKVYDVRKMIAKSEQEIGKATAKYFFYSNIMNFFKTEITLANGEIRKRPLIETNGETGEIVWDKGRDFATVRKVLSMPQVNIVKKTEVQTGGFSKESILPKRNSDKLIARKKDWDPKKYGGFDSPTVAYSVLVVAKVEKGKSKKLKSVKELLGITIMERSSFEKNPIDFLEAKGYKEVKKDLIIKLPKYSLFELENGRKRMLASAGELQKGNELALPSKYVNFLYLASHYEKLKGSPEDNEQKQLFVEQHKHYLDEIIEQISEFSKRVILADANLDKVLSAYNKHRDKPIREQAENIIHLFTLTNLGAPAAFKYFDTTIDRKRYTSTKEVLDATLIHQSITGLYETRIDLSQLGGD

SEQ ID NO: 565 - protein, 1550 aa, synthetic construct
  VARIANT 155: note = D, G or V
MSEVEFSYEYWMRHALTLAKRAWDEREVPVGAVLVHNNRVIGEGWNRPIGRHDPTAHAEIMALRQGGLVMQNYRLIDATLYVTLEPCVMCAGAMIHSRIGRVVFGARNAKTGAAGSLMDVLHHPGMSHRVEITEGILADECAALLSDFFRMRRQXIKAQKKAQSSTDSGSETPGTSESATPESDKKYSIGLAIGTNSVGWAVITDEYKVPSKKFKVLGNTDRHSIKKNLIGALLFDSGETAEATRLKRTARRRYTRRKNRICYLQEIFSNEMAKVDDSFFHRLEESFLVEEDKKHERHPIFGNIVDEVAYHEKYPTIYHLRKKLVDSTDKADLRLIYLALAHMIKFRGHFLIEGDLNPDNSDVDKLFIQLVQTYNQLFEENPINASGVDAKAILSARLSKSRRLENLIAQLPGEKKNGLFGNLIALSLGLTPNFKSNFDLAEDAKLQLSKDTYDDDLDNLLAQIGDQYADLFLAAKNLSDAILLSDILRVNTEITKAPLSASMIKRYDEHHQDLTLLKALVRQQLPEKYKEIFFDQSKNGYAGYIDGGASQEEFYKFIKPILEKMDGTEELLVKLNREDLLRKQRTFDNGSIPHQIHLGELHAILRRQEDFYPFLKDNREKIEKILTFRIPYYVGPLARGNSRFAWMTRKSEETITPWNFEEVVDKGASAQSFIERMTNFDKNLPNEKVLPKHSLLYEYFTVYNELTKVKYVTEGMRKPAFLSGEQKKAIVDLLFKTNRKVTVKQLKEDYFKKIECFDSVEISGVEDRFNASLGTYHDLLKIIKDKDFLDNEENEDILEDIVLTLTLFEDREMIEERLKTYAHLFDDKVMKQLKRRRYTGWGRLSRKLINGIRDKQSGKTILDFLKSDGFANRNFMQLIHDDSLTFKEDIQKAQVSGQGDSLHEHIANLAGSPAIKKGILQTVKVVDELVKVMGRHKPENIVIEMARENQTTQKGQKNSRERMKRIEEGIKELGSQILKEHPVENTQLQNEKLYLYYLQNGRDMYVDQELDINRLSDYDVDAIVPQSFLKDDSIDNKVLTRSDKNRGKSDNVPSEEVVKKMKNYWRQLLNAKLITQRKFDNLTKAERGGLSELDKAGFIKRQLVETRQITKHVAQILDSRMNTKYDENDKLIREVKVITLKSKLVSDFRKDFQFYKVREINNYHHAHDAYLNAVVGTALIKKYPKLESEFVYGDYKVYDVRKMIAKSEQEIGKATAKYFFYSNIMNFFKTEITLANGEIRKRPLIETNGETGEIVWDKGRDFATVRKVLSMPQVNIVKKTEVQTGGFSKESILPKRNSDKLIARKKDWDPKKYGGFDSPTVAYSVLVVAKVEKGKSKKLKSVKELLGITIMERSSFEKNPIDFLEAKGYKEVKKDLIIKLPKYSLFELENGRKRMLASAGELQKGNELALPSKYVNFLYLASHYEKLKGSPEDNEQKQLFVEQHKHYLDEIIEQISEFSKRVILADANLDKVLSAYNKHRDKPIREQAENIIHLFTLTNLGAPAAFKYFDTTIDRKRYTSTKEVLDATLIHQSITGLYETRIDLSQLGGD

SEQ ID NO: 566 - protein, 1775 aa, synthetic construct
MSEVEFSHEYWMRHALTLAKRAWDEREVPVGAVLVHNNRVIGEGWNRPIGRHDPTAHAEIMALRQGGLVMQNYRLIDATLYVTLEPCVMCAGAMIHSRIGRVVFGARDAKTGAAGSLMDVLHHPGMNHRVEITEGILADECAALLSDFFRMRRQEIKAQKKAQSSTDSGGSSGGSSGSETPGTSESATPESSGGSSGGSSEVEFSHEYWMRHALTLAKRALDEREVPVGAVLVLNNRVIGEGWNRAIGLHDPTAHAEIMALRQGGLVMQNYRLIDATLYVTFEPCVMCAGAMIHSRIGRVVFGVRNAKTGAAGSLMDVLHYPGMNHRVEITEGILADECAALLCYFFRMPRQVFNAQKKAQSSTDSGGSSGGSSGSETPGTSESATPESSGGSSGGSDKKYSIGLAIGTNSVGWAVITDEYKVPSKKFKVLGNTDRHSIKKNLIGALLFDSGETAEATRLKRTARRRYTRRKNRICYLQEIFSNEMAKVDDSFFHRLEESFLVEEDKKHERHPIFGNIVDEVAYHEKYPTIYHLRKKLVDSTDKADLRLIYLALAHMIKFRGHFLIEGDLNPDNSDVDKLFIQLVQTYNQLFEENPINASGVDAKAILSARLSKSRRLENLIAQLPGEKKNGLFGNLIALSLGLTPNFKSNFDLAEDAKLQLSKDTYDDDLDNLLAQIGDQYADLFLAAKNLSDAILLSDILRVNTEITKAPLSASMIKRYDEHHQDLTLLKALVRQQLPEKYKEIFFDQSKNGYAGYIDGGASQEEFYKFIKPILEKMDGTEELLVKLNREDLLRKQRTFDNGSIPHQIHLGELHAILRRQEDFYPFLKDNREKIEKILTFRIPYYVGPLARGNSRFAWMTRKSEETITPWNFEEVVDKGASAQSFIERMTNFDKNLPNEKVLPKHSLLYEYFTVYNELTKVKYVTEGMRKPAFLSGEQKKAIVDLLFKTNRKVTVKQLKEDYFKKIECFDSVEISGVEDRFNASLGTYHDLLKIIKDKDFLDNEENEDILEDIVLTLTLFEDREMIEERLKTYAHLFDDKVMKQLKRRRYTGWGRLSRKLINGIRDKQSGKTILDFLKSDGFANRNFMQLIHDDSLTFKEDIQKAQVSGQGDSLHEHIANLAGSPAIKKGILQTVKVVDELVKVMGRHKPENIVIEMARENQTTQKGQKNSRERMKRIEEGIKELGSQILKEHPVENTQLQNEKLYLYYLQNGRDMYVDQELDINRLSDYDVDHIVPQSFLKDDSIDNKVLTRSDKNRGKSDNVPSEEVVKKMKNYWRQLLNAKLITQRKFDNLTKAERGGLSELDKAGFIKRQLVETRQITKHVAQILDSRMNTKYDENDKLIREVKVITLKSKLVSDFRKDFQFYKVREINNYHHAHDAYLNAVVGTALIKKYPKLESEFVYGDYKVYDVRKMIAKSEQEIGKATAKYFFYSNIMNFFKTEITLANGEIRKRPLIETNGETGEIVWDKGRDFATVRKVLSMPQVNIVKKTEVQTGGFSKESILPKRNSDKLIARKKDWDPKKYGGFDSPTVAYSVLVVAKVEKGKSKKLKSVKELLGITIMERSSFEKNPIDFLEAKGYKEVKKDLIIKLPKYSLFELENGRKRMLASAGELQKGNELALPSKYVNFLYLASHYEKLKGSPEDNEQKQLFVEQHKHYLDEIIEQISEFSKRVILADANLDKVLSAYNKHRDKPIREQAENIIHLFTLTNLGAPAAFKYFDTTIDRKRYTSTKEVLDATLIHQSITGLYETRIDLSQLGGDSGGSPKKKRKV

SEQ ID NO: 567 - protein, 1767 aa, synthetic construct
MSEVEFSHEYWMRHALTLAKRAWDEREVPVGAVLVHNNRVIGEGWNRPIGRHDPTAHAEIMALRQGGLVMQNYRLIDATLYVTLEPCVMCAGAMIHSRIGRVVFGARDAKTGAAGSLMDVLHHPGMNHRVEITEGILADECAALLSDFFRMRRQEIKAQKKAQSSTDSGGSSGGSSGSETPGTSESATPESSGGSSGGSSEVEFSHEYWMRHALTLAKRARDEREVPVGAVLVLNNRVIGEGWNRAIGLHDPTAHAEIMALRQGGLVMQNYRLIDATLYVTFEPCVMCAGAMIHSRIGRVVFGVRNAKTGAAGSLMDVLHYPGMNHRVEITEGILADECAALLCYFFRMPRQVFNAQKKAQSSTDSGGSSGGSSGSETPGTSESATPESDKKYSIGLAIGTNSVGWAVITDEYKVPSKKFKVLGNTDRHSIKKNLIGALLFDSGETAEATRLKRTARRRYTRRKNRICYLQEIFSNEMAKVDDSFFHRLEESFLVEEDKKHERHPIFGNIVDEVAYHEKYPTIYHLRKKLVDSTDKADLRLIYLALAHMIKFRGHFLIEGDLNPDNSDVDKLFIQLVQTYNQLFEENPINASGVDAKAILSARLSKSRRLENLIAQLPGEKKNGLFGNLIALSLGLTPNFKSNFDLAEDAKLQLSKDTYDDDLDNLLAQIGDQYADLFLAAKNLSDAILLSDILRVNTEITKAPLSASMIKRYDEHHQDLTLLKALVRQQLPEKYKEIFFDQSKNGYAGYIDGGASQEEFYKFIKPILEKMDGTEELLVKLNREDLLRKQRTFDNGSIPHQIHLGELHAILRRQEDFYPFLKDNREKIEKILTFRIPYYVGPLARGNSRFAWMTRKSEETITPWNFEEVVDKGASAQSFIERMTNFDKNLPNEKVLPKHSLLYEYFTVYNELTKVKYVTEGMRKPAFLSGEQKKAIVDLLFKTNRKVTVKQLKEDYFKKIECFDSVEISGVEDRFNASLGTYHDLLKIIKDKDFLDNEENEDILEDIVLTLTLFEDREMIEERLKTYAHLFDDKVMKQLKRRRYTGWGRLSRKLINGIRDKQSGKTILDFLKSDGFANRNFMQLIHDDSLTFKEDIQKAQVSGQGDSLHEHIANLAGSPAIKKGILQTVKVVDELVKVMGRHKPENIVIEMARENQTTQKGQKNSRERMKRIEEGIKELGSQILKEHPVENTQLQNEKLYLYYLQNGRDMYVDQELDINRLSDYDVDHIVPQSFLKDDSIDNKVLTRSDKNRGKSDNVPSEEVVKKMKNYWRQLLNAKLITQRKFDNLTKAERGGLSELDKAGFIKRQLVETRQITKHVAQILDSRMNTKYDENDKLIREVKVITLKSKLVSDFRKDFQFYKVREINNYHHAHDAYLNAVVGTALIKKYPKLESEFVYGDYKVYDVRKMIAKSEQEIGKATAKYFFYSNIMNFFKTEITLANGEIRKRPLIETNGETGEIVWDKGRDFATVRKVLSMPQVNIVKKTEVQTGGFSKESILPKRNSDKLIARKKDWDPKKYGGFDSPTVAYSVLVVAKVEKGKSKKLKSVKELLGITIMERSSFEKNPIDFLEAKGYKEVKKDLIIKLPKYSLFELENGRKRMLASAGELQKGNELALPSKYVNFLYLASHYEKLKGSPEDNEQKQLFVEQHKHYLDEIIEQISEFSKRVILADANLDKVLSAYNKHRDKPIREQAENIIHLFTLTNLGAPAAFKYFDTTIDRKRYTSTKEVLDATLIHQSITGLYETRIDLSQLGGDSGGSPKKKRKV

SEQ ID NO: 568 - protein, 1775 aa, synthetic construct
MSEVEFSHEYWMRHALTLAKRAWDEREVPVGAVLVHNNRVIGEGWNRPIGRHDPTAHAEIMALRQGGLVMQNYRLIDATLYVTLEPCVMCAGAMIHSRIGRVVFGARDAKTGAAGSLMDVLHHPGMNHRVEITEGILADECAALLSDFFRMRRQEIKAQKKAQSSTDSGGSSGGSSGSETPGTSESATPESSGGSSGGSSEVEFSHEYWMRHALTLAKRAWDEREVPVGAVLVHNNRVIGEGWNRPIGRHDPTAHAEIMALRQGGLVMQNYRLIDATLYVTFEPCVMCAGAMIHSRIGRVVFGVRNAKTGAAGSLMDVLHYPGMNHRVEITEGILADECAALLSYFFRMRRQVFKAQKKAQSSTDSGGSSGGSSGSETPGTSESATPESSGGSSGGSDKKYSIGLAIGTNSVGWAVITDEYKVPSKKFKVLGNTDRHSIKKNLIGALLFDSGETAEATRLKRTARRRYTRRKNRICYLQEIFSNEMAKVDDSFFHRLEESFLVEEDKKHERHPIFGNIVDEVAYHEKYPTIYHLRKKLVDSTDKADLRLIYLALAHMIKFRGHFLIEGDLNPDNSDVDKLFIQLVQTYNQLFEENPINASGVDAKAILSARLSKSRRLENLIAQLPGEKKNGLFGNLIALSLGLTPNFKSNFDLAEDAKLQLSKDTYDDDLDNLLAQIGDQYADLFLAAKNLSDAILLSDILRVNTEITKAPLSASMIKRYDEHHQDLTLLKALVRQQLPEKYKEIFFDQSKNGYAGYIDGGASQEEFYKFIKPILEKMDGTEELLVKLNREDLLRKQRTFDNGSIPHQIHLGELHAILRRQEDFYPFLKDNREKIEKILTFRIPYYVGPLARGNSRFAWMTRKSEETITPWNFEEVVDKGASAQSFIERMTNFDKNLPNEKVLPKHSLLYEYFTVYNELTKVKYVTEGMRKPAFLSGEQKKAIVDLLFKTNRKVTVKQLKEDYFKKIECFDSVEISGVEDRFNASLGTYHDLLKIIKDKDFLDNEENEDILEDIVLTLTLFEDREMIEERLKTYAHLFDDKVMKQLKRRRYTGWGRLSRKLINGIRDKQSGKTILDFLKSDGFANRNFMQLIHDDSLTFKEDIQKAQVSGQGDSLHEHIANLAGSPAIKKGILQTVKVVDELVKVMGRHKPENIVIEMARENQTTQKGQKNSRERMKRIEEGIKELGSQILKEHPVENTQLQNEKLYLYYLQNGRDMYVDQELDINRLSDYDVDHIVPQSFLKDDSIDNKVLTRSDKNRGKSDNVPSEEVVKKMKNYWRQLLNAKLITQRKFDNLTKAERGGLSELDKAGFIKRQLVETRQITKHVAQILDSRMNTKYDENDKLIREVKVITLKSKLVSDFRKDFQFYKVREINNYHHAHDAYLNAVVGTALIKKYPKLESEFVYGDYKVYDVRKMIAKSEQEIGKATAKYFFYSNIMNFFKTEITLANGEIRKRPLIETNGETGEIVWDKGRDFATVRKVLSMPQVNIVKKTEVQTGGFSKESILPKRNSDKLIARKKDWDPKKYGGFDSPTVAYSVLVVAKVEKGKSKKLKSVKELLGITIMERSSFEKNPIDFLEAKGYKEVKKDLIIKLPKYSLFELENGRKRMLASAGELQKGNELALPSKYVNFLYLASHYEKLKGSPEDNEQKQLFVEQHKHYLDEIIEQISEFSKRVILADANLDKVLSAYNKHRDKPIREQAENIIHLFTLTNLGAPAAFKYFDTTIDRKRYTSTKEVLDATLIHQSITGLYETRIDLSQLGGDSGGSPKKKRKV

SEQ ID NO: 569 - protein, 1775 aa, synthetic construct
MSEVEFSHEYWMRHALTLAKRAWDEREVPVGAVLVHNNRVIGEGWNRPIGRHDPTAHAEIMALRQGGLVMQNYRLIDATLYVTLEPCVMCAGAMIHSRIGRVVFGARDAKTGAAGSLMDVLHHPGMNHRVEITEGILADECAALLSDFFRMRRQEIKAQKKAQSSTDSGGSSGGSSGSETPGTSESATPESSGGSSGGSSEVEFSHEYWMRHALTLAKRAWDEREVPVGAVLVLNNRVIGEGWNRPIGLHDPTAHAEIMALRQGGLVMQNYRLIDATLYVTFEPCVMCAGAMIHSRIGRVVFGVRNAKTGAAGSLMDVLHYPGMNHRVEITEGILADECAALLCYFFRMRRQVFNAQKKAQSSTDSGGSSGGSSGSETPGTSESATPESSGGSSGGSDKKYSIGLAIGTNSVGWAVITDEYKVPSKKFKVLGNTDRHSIKKNLIGALLFDSGETAEATRLKRTARRRYTRRKNRICYLQEIFSNEMAKVDDSFFHRLEESFLVEEDKKHERHPIFGNIVDEVAYHEKYPTIYHLRKKLVDSTDKADLRLIYLALAHMIKFRGHFLIEGDLNPDNSDVDKLFIQLVQTYNQLFEENPINASGVDAKAILSARLSKSRRLENLIAQLPGEKKNGLFGNLIALSLGLTPNFKSNFDLAEDAKLQLSKDTYDDDLDNLLAQIGDQYADLFLAAKNLSDAILLSDILRVNTEITKAPLSASMIKRYDEHHQDLTLLKALVRQQLPEKYKEIFFDQSKNGYAGYIDGGASQEEFYKFIKPILEKMDGTEELLVKLNREDLLRKQRTFDNGSIPHQIHLGELHAILRRQEDFYPFLKDNREKIEKILTFRIPYYVGPLARGNSRFAWMTRKSEETITPWNFEEVVDKGASAQSFIERMTNFDKNLPNEKVLPKHSLLYEYFTVYNELTKVKYVTEGMRKPAFLSGEQKKAIVDLLFKTNRKVTVKQLKEDYFKKIECFDSVEISGVEDRFNASLGTYHDLLKIIKDKDFLDNEENEDILEDIVLTLTLFEDREMIEERLKTYAHLFDDKVMKQLKRRRYTGWGRLSRKLINGIRDKQSGKTILDFLKSDGFANRNFMQLIHDDSLTFKEDIQKAQVSGQGDSLHEHIANLAGSPAIKKGILQTVKVVDELVKVMGRHKPENIVIEMARENQTTQKGQKNSRERMKRIEEGIKELGSQILKEHPVENTQLQNEKLYLYYLQNGRDMYVDQELDINRLSDYDVDHIVPQSFLKDDSIDNKVLTRSDKNRGKSDNVPSEEVVKKMKNYWRQLLNAKLITQRKFDNLTKAERGGLSELDKAGFIKRQLVETRQITKHVAQILDSRMNTKYDENDKLIREVKVITLKSKLVSDFRKDFQFYKVREINNYHHAHDAYLNAVVGTALIKKYPKLESEFVYGDYKVYDVRKMIAKSEQEIGKATAKYFFYSNIMNFFKTEITLANGEIRKRPLIETNGETGEIVWDKGRDFATVRKVLSMPQVNIVKKTEVQTGGFSKESILPKRNSDKLIARKKDWDPKKYGGFDSPTVAYSVLVVAKVEKGKSKKLKSVKELLGITIMERSSFEKNPIDFLEAKGYKEVKKDLIIKLPKYSLFELENGRKRMLASAGELQKGNELALPSKYVNFLYLASHYEKLKGSPEDNEQKQLFVEQHKHYLDEIIEQISEFSKRVILADANLDKVLSAYNKHRDKPIREQAENIIHLFTLTNLGAPAAFKYFDTTIDRKRYTSTKEVLDATLIHQSITGLYETRIDLSQLGGDSGGSPKKKRKV

SEQ ID NO: 570 - protein, 1767 aa, synthetic construct
MSEVEFSHEYWMRHALTLAKRAWDEREVPVGAVLVHNNRVIGEGWNRPIGRHDPTAHAEIMALRQGGLVMQNYRLIDATLYVTLEPCVMCAGAMIHSRIGRVVFGARDAKTGAAGSLMDVLHHPGMNHRVEITEGILADECAALLSDFFRMRRQEIKAQKKAQSSTDSGGSSGGSSGSETPGTSESATPESSGGSSGGSSEVEFSHEYWMRHALTLAKRAWDEREVPVGAVLVLNNRVIGEGWNRPIGLHDPTAHAEIMALRQGGLVMQNYRLIDATLYVTFEPCVMCAGAMIHSRIGRVVFGVRNAKTGAAGSLMDVLHYPGMNHRVEITEGILADECAALLCYFFRMRRQVFNAQKKAQSSTDSGGSSGGSSGSETPGTSESATPESDKKYSIGLAIGTNSVGWAVITDEYKVPSKKFKVLGNTDRHSIKKNLIGALLFDSGETAEATRLKRTARRRYTRRKNRICYLQEIFSNEMAKVDDSFFHRLEESFLVEEDKKHERHPIFGNIVDEVAYHEKYPTIYHLRKKLVDSTDKADLRLIYLALAHMIKFRGHFLIEGDLNPDNSDVDKLFIQLVQTYNQLFEENPINASGVDAKAILSARLSKSRRLENLIAQLPGEKKNGLFGNLIALSLGLTPNFKSNFDLAEDAKLQLSKDTYDDDLDNLLAQIGDQYADLFLAAKNLSDAILLSDILRVNTEITKAPLSASMIKRYDEHHQDLTLLKALVRQQLPEKYKEIFFDQSKNGYAGYIDGGASQEEFYKFIKPILEKMDGTEELLVKLNREDLLRKQRTFDNGSIPHQIHLGELHAILRRQEDFYPFLKDNREKIEKILTFRIPYYVGPLARGNSRFAWMTRKSEETITPWNFEEVVDKGASAQSFIERMTNFDKNLPNEKVLPKHSLLYEYFTVYNELTKVKYVTEGMRKPAFLSGEQKKAIVDLLFKTNRKVTVKQLKEDYFKKIECFDSVEISGVEDRFNASLGTYHDLLKIIKDKDFLDNEENEDILEDIVLTLTLFEDREMIEERLKTYAHLFDDKVMKQLKRRRYTGWGRLSRKLINGIRDKQSGKTILDFLKSDGFANRNFMQLIHDDSLTFKEDIQKAQVSGQGDSLHEHIANLAGSPAIKKGILQTVKVVDELVKVMGRHKPENIVIEMARENQTTQKGQKNSRERMKRIEEGIKELGSQILKEHPVENTQLQNEKLYLYYLQNGRDMYVDQELDINRLSDYDVDHIVPQSFLKDDSIDNKVLTRSDKNRGKSDNVPSEEVVKKMKNYWRQLLNAKLITQRKFDNLTKAERGGLSELDKAGFIKRQLVETRQITKHVAQILDSRMNTKYDENDKLIREVKVITLKSKLVSDFRKDFQFYKVREINNYHHAHDAYLNAVVGTALIKKYPKLESEFVYGDYKVYDVRKMIAKSEQEIGKATAKYFFYSNIMNFFKTEITLANGEIRKRPLIETNGETGEIVWDKGRDFATVRKVLSMPQVNIVKKTEVQTGGFSKESILPKRNSDKLIARKKDWDPKKYGGFDSPTVAYSVLVVAKVEKGKSKKLKSVKELLGITIMERSSFEKNPIDFLEAKGYKEVKKDLIIKLPKYSLFELENGRKRMLASAGELQKGNELALPSKYVNFLYLASHYEKLKGSPEDNEQKQLFVEQHKHYLDEIIEQISEFSKRVILADANLDKVLSAYNKHRDKPIREQAENIIHLFTLTNLGAPAAFKYFDTTIDRKRYTSTKEVLDATLIHQSITGLYETRIDLSQLGGDSGGSPKKKRKV

SEQ ID NO: 571 - protein, 1775 aa, synthetic construct
MSEVEFSHEYWMRHALTLAKRAWDEREVPVGAVLVHNNRVIGEGWNRPIGRHDPTAHAEIMALRQGGLVMQNYRLIDATLYVTLEPCVMCAGAMIHSRIGRVVFGARDAKTGAAGSLMDVLHHPGMNHRVEITEGILADECAALLSDFFRMRRQEIKAQKKAQSSTDSGGSSGGSSGSETPGTSESATPESSGGSSGGSSEVEFSHEYWMRHALTLAKRAWDEREVPVGAVLVLNNRVIGEGWNRSIGLHDPTAHAEIMALRQGGLVMQNYRLIDATLYVTFEPCVMCAGAMIHSRIGRVVFGVRNAKTGAAGSLMDVLHYPGMNHRVEITEGILADECAALLCYFFRMRRQVFNAQKKAQSSTDSGGSSGGSSGSETPGTSESATPESSGGSSGGSDKKYSIGLAIGTNSVGWAVITDEYKVPSKKFKVLGNTDRHSIKKNLIGALLFDSGETAEATRLKRTARRRYTRRKNRICYLQEIFSNEMAKVDDSFFHRLEESFLVEEDKKHERHPIFGNIVDEVAYHEKYPTIYHLRKKLVDSTDKADLRLIYLALAHMIKFRGHFLIEGDLNPDNSDVDKLFIQLVQTYNQLFEENPINASGVDAKAILSARLSKSRRLENLIAQLPGEKKNGLFGNLIALSLGLTPNFKSNFDLAEDAKLQLSKDTYDDDLDNLLAQIGDQYADLFLAAKNLSDAILLSDILRVNTEITKAPLSASMIKRYDEHHQDLTLLKALVRQQLPEKYKEIFFDQSKNGYAGYIDGGASQEEFYKFIKPILEKMDGTEELLVKLNREDLLRKQRTFDNGSIPHQIHLGELHAILRRQEDFYPFLKDNREKIEKILTFRIPYYVGPLARGNSRFAWMTRKSEETITPWNFEEVVDKGASAQSFIERMTNFDKNLPNEKVLPKHSLLYEYFTVYNELTKVKYVTEGMRKPAFLSGEQKKAIVDLLFKTNRKVTVKQLKEDYFKKIECFDSVEISGVEDRFNASLGTYHDLLKIIKDKDFLDNEENEDILEDIVLTLTLFEDREMIEERLKTYAHLFDDKVMKQLKRRRYTGWGRLSRKLINGIRDKQSGKTILDFLKSDGFANRNFMQLIHDDSLTFKEDIQKAQVSGQGDSLHEHIANLAGSPAIKKGILQTVKVVDELVKVMGRHKPENIVIEMARENQTTQKGQKNSRERMKRIEEGIKELGSQILKEHPVENTQLQNEKLYLYYLQNGRDMYVDQELDINRLSDYDVDHIVPQSFLKDDSIDNKVLTRSDKNRGKSDNVPSEEVVKKMKNYWRQLLNAKLITQRKFDNLTKAERGGLSELDKAGFIKRQLVETRQITKHVAQILDSRMNTKYDENDKLIREVKVITLKSKLVSDFRKDFQFYKVREINNYHHAHDAYLNAVVGTALIKKYPKLESEFVYGDYKVYDVRKMIAKSEQEIGKATAKYFFYSNIMNFFKTEITLANGEIRKRPLIETNGETGEIVWDKGRDFATVRKVLSMPQVNIVKKTEVQTGGFSKESILPKRNSDKLIARKKDWDPKKYGGFDSPTVAYSVLVVAKVEKGKSKKLKSVKELLGITIMERSSFEKNPIDFLEAKGYKEVKKDLIIKLPKYSLFELENGRKRMLASAGELQKGNELALPSKYVNFLYLASHYEKLKGSPEDNEQKQLFVEQHKHYLDEIIEQISEFSKRVILADANLDKVLSAYNKHRDKPIREQAENIIHLFTLTNLGAPAAFKYFDTTIDRKRYTSTKEVLDATLIHQSITGLYETRIDLSQLGGDSGGSPKKKRKV

SEQ ID NO: 572 - protein, 1775 aa, synthetic construct
MSEVEFSHEYWMRHALTLAKRAWDEREVPVGAVLVHNNRVIGEGWNRPIGRHDPTAHAEIMALRQGGLVMQNYRLIDATLYVTLEPCVMCAGAMIHSRIGRVVFGARDAKTGAAGSLMDVLHHPGMNHRVEITEGILADECAALLSDFFRMRRQEIKAQKKAQSSTDSGGSSGGSSGSETPGTSESATPESSGGSSGGSSEVEFSHEYWMRHALTLAKRAWDEREVPVGAVLVLNNRVIGEGWNRSIGLHDPTAHAEIMALRQGGLVMQNYRLIDATLYVTFEPCVMCAGAMIHSRIGRVVFGVRNAKTGAAGSLMDVLHYPGMNHRVEITEGILADECNALLCYFFRMRRQVFNAQKKAQSSTDSGGSSGGSSGSETPGTSESATPESSGGSSGGSDKKYSIGLAIGTNSVGWAVITDEYKVPSKKFKVLGNTDRHSIKKNLIGALLFDSGETAEATRLKRTARRRYTRRKNRICYLQEIFSNEMAKVDDSFFHRLEESFLVEEDKKHERHPIFGNIVDEVAYHEKYPTIYHLRKKLVDSTDKADLRLIYLALAHMIKFRGHFLIEGDLNPDNSDVDKLFIQLVQTYNQLFEENPINASGVDAKAILSARLSKSRRLENLIAQLPGEKKNGLFGNLIALSLGLTPNFKSNFDLAEDAKLQLSKDTYDDDLDNLLAQIGDQYADLFLAAKNLSDAILLSDILRVNTEITKAPLSASMIKRYDEHHQDLTLLKALVRQQLPEKYKEIFFDQSKNGYAGYIDGGASQEEFYKFIKPILEKMDGTEELLVKLNREDLLRKQRTFDNGSIPHQIHLGELHAILRRQEDFYPFLKDNREKIEKILTFRIPYYVGPLARGNSRFAWMTRKSEETITPWNFEEVVDKGASAQSFIERMTNFDKNLPNEKVLPKHSLLYEYFTVYNELTKVKYVTEGMRKPAFLSGEQKKAIVDLLFKTNRKVTVKQLKEDYFKKIECFDSVEISGVEDRFNASLGTYHDLLKIIKDKDFLDNEENEDILEDIVLTLTLFEDREMIEERLKTYAHLFDDKVMKQLKRRRYTGWGRLSRKLINGIRDKQSGKTILDFLKSDGFANRNFMQLIHDDSLTFKEDIQKAQVSGQGDSLHEHIANLAGSPAIKKGILQTVKVVDELVKVMGRHKPENIVIEMARENQTTQKGQKNSRERMKRIEEGIKELGSQILKEHPVENTQLQNEKLYLYYLQNGRDMYVDQELDINRLSDYDVDHIVPQSFLKDDSIDNKVLTRSDKNRGKSDNVPSEEVVKKMKNYWRQLLNAKLITQRKFDNLTKAERGGLSELDKAGFIKRQLVETRQITKHVAQILDSRMNTKYDENDKLIREVKVITLKSKLVSDFRKDFQFYKVREINNYHHAHDAYLNAVVGTALIKKYPKLESEFVYGDYKVYDVRKMIAKSEQEIGKATAKYFFYSNIMNFFKTEITLANGEIRKRPLIETNGETGEIVWDKGRDFATVRKVLSMPQVNIVKKTEVQTGGFSKESILPKRNSDKLIARKKDWDPKKYGGFDSPTVAYSVLVVAKVEKGKSKKLKSVKELLGITIMERSSFEKNPIDFLEAKGYKEVKKDLIIKLPKYSLFELENGRKRMLASAGELQKGNELALPSKYVNFLYLASHYEKLKGSPEDNEQKQLFVEQHKHYLDEIIEQISEFSKRVILADANLDKVLSAYNKHRDKPIREQAENIIHLFTLTNLGAPAAFKYFDTTIDRKRYTSTKEVLDATLIHQSITGLYETRIDLSQLGGDSGGSPKKKRKV

SEQ ID NO: 573 - protein, 1775 aa, synthetic construct
MSEVEFSHEYWMRHALTLAKRAWDEREVPVGAVLVHNNRVIGEGWNRPIGRHDPTAHAEIMALRQGGLVMQNYRLIDATLYVTLEPCVMCAGAMIHSRIGRVVFGARDAKTGAAGSLMDVLHHPGMNHRVEITEGILADECAALLSDFFRMRRQEIKAQKKAQSSTDSGGSSGGSSGSETPGTSESATPESSGGSSGGSSEVEFSHEYWMRHALTLAKRAWDEREVPVGAVLVLNNRVIGEGWNRAIGLHDPTAHAEIMALRQGGLVMQNYRLIDATLYVTFEPCVMCAGAMIHSRIGRVVFGVRNAKTGAAGSLMDVLHYPGMNHRVEITEGILADECAALLCYFFRMRRQVFNAQKKAQSSTDSGGSSGGSSGSETPGTSESATPESSGGSSGGSDKKYSIGLAIGTNSVGWAVITDEYKVPSKKFKVLGNTDRHSIKKNLIGALLFDSGETAEATRLKRTARRRYTRRKNRICYLQEIFSNEMAKVDDSFFHRLEESFLVEEDKKHERHPIFGNIVDEVAYHEKYPTIYHLRKKLVDSTDKADLRLIYLALAHMIKFRGHFLIEGDLNPDNSDVDKLFIQLVQTYNQLFEENPINASGVDAKAILSARLSKSRRLENLIAQLPGEKKNGLFGNLIALSLGLTPNFKSNFDLAEDAKLQLSKDTYDDDLDNLLAQIGDQYADLFLAAKNLSDAILLSDILRVNTEITKAPLSASMIKRYDEHHQDLTLLKALVRQQLPEKYKEIFFDQSKNGYAGYIDGGASQEEFYKFIKPILEKMDGTEELLVKLNREDLLRKQRTFDNGSIPHQIHLGELHAILRRQEDFYPFLKDNREKIEKILTFRIPYYVGPLARGNSRFAWMTRKSEETITPWNFEEVVDKGASAQSFIERMTNFDKNLPNEKVLPKHSLLYEYFTVYNELTKVKYVTEGMRKPAFLSGEQKKAIVDLLFKTNRKVTVKQLKEDYFKKIECFDSVEISGVEDRFNASLGTYHDLLKIIKDKDFLDNEENEDILEDIVLTLTLFEDREMIEERLKTYAHLFDDKVMKQLKRRRYTGWGRLSRKLINGIRDKQSGKTILDFLKSDGFANRNFMQLIHDDSLTFKEDIQKAQVSGQGDSLHEHIANLAGSPAIKKGILQTVKVVDELVKVMGRHKPENIVIEMARENQTTQKGQKNSRERMKRIEEGIKELGSQILKEHPVENTQLQNEKLYLYYLQNGRDMYVDQELDINRLSDYDVDHIVPQSFLKDDSIDNKVLTRSDKNRGKSDNVPSEEVVKKMKNYWRQLLNAKLITQRKFDNLTKAERGGLSELDKAGFIKRQLVETRQITKHVAQILDSRMNTKYDENDKLIREVKVITLKSKLVSDFRKDFQFYKVREINNYHHAHDAYLNAVVGTALIKKYPKLESEFVYGDYKVYDVRKMIAKSEQEIGKATAKYFFYSNIMNFFKTEITLANGEIRKRPLIETNGETGEIVWDKGRDFATVRKVLSMPQVNIVKKTEVQTGGFSKESILPKRNSDKLIARKKDWDPKKYGGFDSPTVAYSVLVVAKVEKGKSKKLKSVKELLGITIMERSSFEKNPIDFLEAKGYKEVKKDLIIKLPKYSLFELENGRKRMLASAGELQKGNELALPSKYVNFLYLASHYEKLKGSPEDNEQKQLFVEQHKHYLDEIIEQISEFSKRVILADANLDKVLSAYNKHRDKPIREQAENIIHLFTLTNLGAPAAFKYFDTTIDRKRYTSTKEVLDATLIHQSITGLYETRIDLSQLGGDSGGSPKKKRKV

SEQ ID NO: 574 - protein, 1775 aa, synthetic construct
MSEVEFSHEYWMRHALTLAKRAWDEREVPVGAVLVHNNRVIGEGWNRPIGRHDPTAHAEIMALRQGGLVMQNYRLIDATLYVTLEPCVMCAGAMIHSRIGRVVFGARDAKTGAAGSLMDVLHHPGMNHRVEITEGILADECAALLSDFFRMRRQEIKAQKKAQSSTDSGGSSGGSSGSETPGTSESATPESSGGSSGGSSEVEFSHEYWMRHALTLAKRAWDEREVPVGAVLVLNNRVIGEGWNRAIGLHDPTAHAEIMALRQGGLVMQNYRLIDATLYVTFEPCVMCAGAMIHSRIGRVVFGVRNAKTGAAGSLMDVLHYPGMNHRVEITEGILADECNALLCYFFRMRRQVFNAQKKAQSSTDSGGSSGGSSGSETPGTSESATPESSGGSSGGSDKKYSIGLAIGTNSVGWAVITDEYKVPSKKFKVLGNTDRHSIKKNLIGALLFDSGETAEATRLKRTARRRYTRRKNRICYLQEIFSNEMAKVDDSFFHRLEESFLVEEDKKHERHPIFGNIVDEVAYHEKYPTIYHLRKKLVDSTDKADLRLIYLALAHMIKFRGHFLIEGDLNPDNSDVDKLFIQLVQTYNQLFEENPINASGVDAKAILSARLSKSRRLENLIAQLPGEKKNGLFGNLIALSLGLTPNFKSNFDLAEDAKLQLSKDTYDDDLDNLLAQIGDQYADLFLAAKNLSDAILLSDILRVNTEITKAPLSASMIKRYDEHHQDLTLLKALVRQQLPEKYKEIFFDQSKNGYAGYIDGGASQEEFYKFIKPILEKMDGTEELLVKLNREDLLRKQRTFDNGSIPHQIHLGELHAILRRQEDFYPFLKDNREKIEKILTFRIPYYVGPLARGNSRFAWMTRKSEETITPWNFEEVVDKGASAQSFIERMTNFDKNLPNEKVLPKHSLLYEYFTVYNELTKVKYVTEGMRKPAFLSGEQKKAIVDLLFKTNRKVTVKQLKEDYFKKIECFDSVEISGVEDRFNASLGTYHDLLKIIKDKDFLDNEENEDILEDIVLTLTLFEDREMIEERLKTYAHLFDDKVMKQLKRRRYTGWGRLSRKLINGIRDKQSGKTILDFLKSDGFANRNFMQLIHDDSLTFKEDIQKAQVSGQGDSLHEHIANLAGSPAIKKGILQTVKVVDELVKVMGRHKPENIVIEMARENQTTQKGQKNSRERMKRIEEGIKELGSQILKEHPVENTQLQNEKLYLYYLQNGRDMYVDQELDINRLSDYDVDHIVPQSFLKDDSIDNKVLTRSDKNRGKSDNVPSEEVVKKMKNYWRQLLNAKLITQRKFDNLTKAERGGLSELDKAGFIKRQLVETRQITKHVAQILDSRMNTKYDENDKLIREVKVITLKSKLVSDFRKDFQFYKVREINNYHHAHDAYLNAVVGTALIKKYPKLESEFVYGDYKVYDVRKMIAKSEQEIGKATAKYFFYSNIMNFFKTEITLANGEIRKRPLIETNGETGEIVWDKGRDFATVRKVLSMPQVNIVKKTEVQTGGFSKESILPKRNSDKLIARKKDWDPKKYGGFDSPTVAYSVLVVAKVEKGKSKKLKSVKELLGITIMERSSFEKNPIDFLEAKGYKEVKKDLIIKLPKYSLFELENGRKRMLASAGELQKGNELALPSKYVNFLYLASHYEKLKGSPEDNEQKQLFVEQHKHYLDEIIEQISEFSKRVILADANLDKVLSAYNKHRDKPIREQAENIIHLFTLTNLGAPAAFKYFDTTIDRKRYTSTKEVLDATLIHQSITGLYETRIDLSQLGGDSGGSPKKKRKV

SEQ ID NO: 575 - protein, 1775 aa, synthetic construct
MSEVEFSHEYWMRHALTLAKRAWDEREVPVGAVLVHNNRVIGEGWNRPIGRHDPTAHAEIMALRQGGLVMQNYRLIDATLYVTLEPCVMCAGAMIHSRIGRVVFGARDAKTGAAGSLMDVLHHPGMNHRVEITEGILADECAALLSDFFRMRRQEIKAQKKAQSSTDSGGSSGGSSGSETPGTSESATPESSGGSSGGSSEVEFSHEYWMRHALTLAKRARDEREVPVGAVLVLNNRVIGEGWNRAIGLHDPTAHAEIMALRQGGLVMQNYRLIDATLYVTFEPCVMCAGAMIHSRIGRVVFGVRNAKTGAAGSLMDVLHYPGMNHRVEITEGILADECAALLCYFFRMPRQVFNAQKKAQSSTDSGGSSGGSSGSETPGTSESATPESSGGSSGGSDKKYSIGLAIGTNSVGWAVITDEYKVPSKKFKVLGNTDRHSIKKNLIGALLFDSGETAEATRLKRTARRRYTRRKNRICYLQEIFSNEMAKVDDSFFHRLEESFLVEEDKKHERHPIFGNIVDEVAYHEKYPTIYHLRKKLVDSTDKADLRLIYLALAHMIKFRGHFLIEGDLNPDNSDVDKLFIQLVQTYNQLFEENPINASGVDAKAILSARLSKSRRLENLIAQLPGEKKNGLFGNLIALSLGLTPNFKSNFDLAEDAKLQLSKDTYDDDLDNLLAQIGDQYADLFLAAKNLSDAILLSDILRVNTEITKAPLSASMIKRYDEHHQDLTLLKALVRQQLPEKYKEIFFDQSKNGYAGYIDGGASQEEFYKFIKPILEKMDGTEELLVKLNREDLLRKQRTFDNGSIPHQIHLGELHAILRRQEDFYPFLKDNREKIEKILTFRIPYYVGPLARGNSRFAWMTRKSEETITPWNFEEVVDKGASAQSFIERMTNFDKNLPNEKVLPKHSLLYEYFTVYNELTKVKYVTEGMRKPAFLSGEQKKAIVDLLFKTNRKVTVKQLKEDYFKKIECFDSVEISGVEDRFNASLGTYHDLLKIIKDKDFLDNEENEDILEDIVLTLTLFEDREMIEERLKTYAHLFDDKVMKQLKRRRYTGWGRLSRKLINGIRDKQSGKTILDFLKSDGFANRNFMQLIHDDSLTFKEDIQKAQVSGQGDSLHEHIANLAGSPAIKKGILQTVKVVDELVKVMGRHKPENIVIEMARENQTTQKGQKNSRERMKRIEEGIKELGSQILKEHPVENTQLQNEKLYLYYLQNGRDMYVDQELDINRLSDYDVDHIVPQSFLKDDSIDNKVLTRSDKNRGKSDNVPSEEVVKKMKNYWRQLLNAKLITQRKFDNLTKAERGGLSELDKAGFIKRQLVETRQITKHVAQILDSRMNTKYDENDKLIREVKVITLKSKLVSDFRKDFQFYKVREINNYHHAHDAYLNAVVGTALIKKYPKLESEFVYGDYKVYDVRKMIAKSEQEIGKATAKYFFYSNIMNFFKTEITLANGEIRKRPLIETNGETGEIVWDKGRDFATVRKVLSMPQVNIVKKTEVQTGGFSKESILPKRNSDKLIARKKDWDPKKYGGFDSPTVAYSVLVVAKVEKGKSKKLKSVKELLGITIMERSSFEKNPIDFLEAKGYKEVKKDLIIKLPKYSLFELENGRKRMLASAGELQKGNELALPSKYVNFLYLASHYEKLKGSPEDNEQKQLFVEQHKHYLDEIIEQISEFSKRVILADANLDKVLSAYNKHRDKPIREQAENIIHLFTLTNLGAPAAFKYFDTTIDRKRYTSTKEVLDATLIHQSITGLYETRIDLSQLGGDSGGSPKKKRKV

SEQ ID NO: 576 - protein, 1775 aa, synthetic construct
MSEVEFSHEYWMRHALTLAKRAWDEREVPVGAVLVHNNRVIGEGWNRPIGRHDPTAHAEIMALRQGGLVMQNYRLIDATLYVTLEPCVMCAGAMIHSRIGRVVFGARDAKTGAAGSLMDVLHHPGMNHRVEITEGILADECAALLSDFFRMRRQEIKAQKKAQSSTDSGGSSGGSSGSETPGTSESATPESSGGSSGGSSEVEFSHEYWMRHALTLAKRALDEREVPVGAVLVLNNRVIGEGWNRAIGLHDPTAHAEIMALRQGGLVMQNYRLIDATLYVTFEPCVMCAGAMIHSRIGRVVFGVRNAKTGAAGSLMDVLHYPGMNHRVEITEGILADECNALLCYFFRMRRQVFNAQKKAQSSTDSGGSSGGSSGSETPGTSESATPESSGGSSGGSDKKYSIGLAIGTNSVGWAVITDEYKVPSKKFKVLGNTDRHSIKKNLIGALLFDSGETAEATRLKRTARRRYTRRKNRICYLQEIFSNEMAKVDDSFFHRLEESFLVEEDKKHERHPIFGNIVDEVAYHEKYPTIYHLRKKLVDSTDKADLRLIYLALAHMIKFRGHFLIEGDLNPDNSDVDKLFIQLVQTYNQLFEENPINASGVDAKAILSARLSKSRRLENLIAQLPGEKKNGLFGNLIALSLGLTPNFKSNFDLAEDAKLQLSKDTYDDDLDNLLAQIGDQYADLFLAAKNLSDAILLSDILRVNTEITKAPLSASMIKRYDEHHQDLTLLKALVRQQLPEKYKEIFFDQSKNGYAGYIDGGASQEEFYKFIKPILEKMDGTEELLVKLNREDLLRKQRTFDNGSIPHQIHLGELHAILRRQEDFYPFLKDNREKIEKILTFRIPYYVGPLARGNSRFAWMTRKSEETITPWNFEEVVDKGASAQSFIERMTNFDKNLPNEKVLPKHSLLYEYFTVYNELTKVKYVTEGMRKPAFLSGEQKKAIVDLLFKTNRKVTVKQLKEDYFKKIECFDSVEISGVEDRFNASLGTYHDLLKIIKDKDFLDNEENEDILEDIVLTLTLFEDREMIEERLKTYAHLFDDKVMKQLKRRRYTGWGRLSRKLINGIRDKQSGKTILDFLKSDGFANRNFMQLIHDDSLTFKEDIQKAQVSGQGDSLHEHIANLAGSPAIKKGILQTVKVVDELVKVMGRHKPENIVIEMARENQTTQKGQKNSRERMKRIEEGIKELGSQILKEHPVENTQLQNEKLYLYYLQNGRDMYVDQELDINRLSDYDVDHIVPQSFLKDDSIDNKVLTRSDKNRGKSDNVPSEEVVKKMKNYWRQLLNAKLITQRKFDNLTKAERGGLSELDKAGFIKRQLVETRQITKHVAQILDSRMNTKYDENDKLIREVKVITLKSKLVSDFRKDFQFYKVREINNYHHAHDAYLNAVVGTALIKKYPKLESEFVYGDYKVYDVRKMIAKSEQEIGKATAKYFFYSNIMNFFKTEITLANGEIRKRPLIETNGETGEIVWDKGRDFATVRKVLSMPQVNIVKKTEVQTGGFSKESILPKRNSDKLIARKKDWDPKKYGGFDSPTVAYSVLVVAKVEKGKSKKLKSVKELLGITIMERSSFEKNPIDFLEAKGYKEVKKDLIIKLPKYSLFELENGRKRMLASAGELQKGNELALPSKYVNFLYLASHYEKLKGSPEDNEQKQLFVEQHKHYLDEIIEQISEFSKRVILADANLDKVLSAYNKHRDKPIREQAENIIHLFTLTNLGAPAAFKYFDTTIDRKRYTSTKEVLDATLIHQSITGLYETRIDLSQLGGDSGGSPKKKRKV

SEQ ID NO: 577 - protein, 1775 aa, synthetic construct
MSEVEFSHEYWMRHALTLAKRAWDEREVPVGAVLVHNNRVIGEGWNRPIGRHDPTAHAEIMALRQGGLVMQNYRLIDATLYVTLEPCVMCAGAMIHSRIGRVVFGARDAKTGAAGSLMDVLHHPGMNHRVEITEGILADECAALLSDFFRMRRQEIKAQKKAQSSTDSGGSSGGSSGSETPGTSESATPESSGGSSGGSSEVEFSHEYWMRHALTLAKRALDEREVPVGAVLVLNNRVIGEGWNRAIGLHDPTAHAEIMALRQGGLVMQNYRLIDATLYVTFEPCVMCAGAMIHSRIGRVVFGVRNAKTGAAGSLMDVLHYPGMNHRVEITEGILADECNALLCYFFRMPRQVFNAQKKAQSSTDSGGSSGGSSGSETPGTSESATPESSGGSSGGSDKKYSIGLAIGTNSVGWAVITDEYKVPSKKFKVLGNTDRHSIKKNLIGALLFDSGETAEATRLKRTARRRYTRRKNRICYLQEIFSNEMAKVDDSFFHRLEESFLVEEDKKHERHPIFGNIVDEVAYHEKYPTIYHLRKKLVDSTDKADLRLIYLALAHMIKFRGHFLIEGDLNPDNSDVDKLFIQLVQTYNQLFEENPINASGVDAKAILSARLSKSRRLENLIAQLPGEKKNGLFGNLIALSLGLTPNFKSNFDLAEDAKLQLSKDTYDDDLDNLLAQIGDQYADLFLAAKNLSDAILLSDILRVNTEITKAPLSASMIKRYDEHHQDLTLLKALVRQQLPEKYKEIFFDQSKNGYAGYIDGGASQEEFYKFIKPILEKMDGTEELLVKLNREDLLRKQRTFDNGSIPHQIHLGELHAILRRQEDFYPFLKDNREKIEKILTFRIPYYVGPLARGNSRFAWMTRKSEETITPWNFEEVVDKGASAQSFIERMTNFDKNLPNEKVLPKHSLLYEYFTVYNELTKVKYVTEGMRKPAFLSGEQKKAIVDLLFKTNRKVTVKQLKEDYFKKIECFDSVEISGVEDRFNASLGTYHDLLKIIKDKDFLDNEENEDILEDIVLTLTLFEDREMIEERLKTYAHLFDDKVMKQLKRRRYTGWGRLSRKLINGIRDKQSGKTILDFLKSDGFANRNFMQLIHDDSLTFKEDIQKAQVSGQGDSLHEHIANLAGSPAIKKGILQTVKVVDELVKVMGRHKPENIVIEMARENQTTQKGQKNSRERMKRIEEGIKELGSQILKEHPVENTQLQNEKLYLYYLQNGRDMYVDQELDINRLSDYDVDHIVPQSFLKDDSIDNKVLTRSDKNRGKSDNVPSEEVVKKMKNYWRQLLNAKLITQRKFDNLTKAERGGLSELDKAGFIKRQLVETRQITKHVAQILDSRMNTKYDENDKLIREVKVITLKSKLVSDFRKDFQFYKVREINNYHHAHDAYLNAVVGTALIKKYPKLESEFVYGDYKVYDVRKMIAKSEQEIGKATAKYFFYSNIMNFFKTEITLANGEIRKRPLIETNGETGEIVWDKGRDFATVRKVLSMPQVNIVKKTEVQTGGFSKESILPKRNSDKLIARKKDWDPKKYGGFDSPTVAYSVLVVAKVEKGKSKKLKSVKELLGITIMERSSFEKNPIDFLEAKGYKEVKKDLIIKLPKYSLFELENGRKRMLASAGELQKGNELALPSKYVNFLYLASHYEKLKGSPEDNEQKQLFVEQHKHYLDEIIEQISEFSKRVILADANLDKVLSAYNKHRDKPIREQAENIIHLFTLTNLGAPAAFKYFDTTIDRKRYTSTKEVLDATLIHQSITGLYETRIDLSQLGGDSGGSPKKKRKV

SEQ ID NO: 578 - protein, 1775 aa, synthetic construct; identical to SEQ ID NO: 575

SEQ ID NO: 579 - protein, 1767 aa, synthetic construct
MSEVEFSHEYWMRHALTLAKRAWDEREVPVGAVLVHNNRVIGEGWNRPIGRHDPTAHAEIMALRQGGLVMQNYRLIDATLYVTLEPCVMCAGAMIHSRIGRVVFGARDAKTGAAGSLMDVLHHPGMNHRVEITEGILADECAALLSDFFRMRRQEIKAQKKAQSSTDSGGSSGGSSGSETPGTSESATPESSGGSSGGSSEVEFSHEYWMRHALTLAKRAWDEREVPVGAVLVLNNRVIGEGWNRAIGLHDPTAHAEIMALRQGGLVMQNYRLIDATLYVTFEPCVMCAGAMIHSRIGRVVFGVRNAKTGAAGSLMDVLHYPGMNHRVEITEGILADECAALLCYFFRMPRQVFNAQKKAQSSTDSGGSSGGSSGSETPGTSESATPESDKKYSIGLAIGTNSVGWAVITDEYKVPSKKFKVLGNTDRHSIKKNLIGALLFDSGETAEATRLKRTARRRYTRRKNRICYLQEIFSNEMAKVDDSFFHRLEESFLVEEDKKHERHPIFGNIVDEVAYHEKYPTIYHLRKKLVDSTDKADLRLIYLALAHMIKFRGHFLIEGDLNPDNSDVDKLFIQLVQTYNQLFEENPINASGVDAKAILSARLSKSRRLENLIAQLPGEKKNGLFGNLIALSLGLTPNFKSNFDLAEDAKLQLSKDTYDDDLDNLLAQIGDQYADLFLAAKNLSDAILLSDILRVNTEITKAPLSASMIKRYDEHHQDLTLLKALVRQQLPEKYKEIFFDQSKNGYAGYIDGGASQEEFYKFIKPILEKMDGTEELLVKLNREDLLRKQRTFDNGSIPHQIHLGELHAILRRQEDFYPFLKDNREKIEKILTFRIPYYVGPLARGNSRFAWMTRKSEETITPWNFEEVVDKGASAQSFIERMTNFDKNLPNEKVLPKHSLLYEYFTVYNELTKVKYVTEGMRKPAFLSGEQKKAIVDLLFKTNRKVTVKQLKEDYFKKIECFDSVEISGVEDRFNASLGTYHDLLKIIKDKDFLDNEENEDILEDIVLTLTLFEDREMIEERLKTYAHLFDDKVMKQLKRRRYTGWGRLSRKLINGIRDKQSGKTILDFLKSDGFANRNFMQLIHDDSLTFKEDIQKAQVSGQGDSLHEHIANLAGSPAIKKGILQTVKVVDELVKVMGRHKPENIVIEMARENQTTQKGQKNSRERMKRIEEGIKELGSQILKEHPVENTQLQNEKLYLYYLQNGRDMYVDQELDINRLSDYDVDHIVPQSFLKDDSIDNKVLTRSDKNRGKSDNVPSEEVVKKMKNYWRQLLNAKLITQRKFDNLTKAERGGLSELDKAGFIKRQLVETRQITKHVAQILDSRMNTKYDENDKLIREVKVITLKSKLVSDFRKDFQFYKVREINNYHHAHDAYLNAVVGTALIKKYPKLESEFVYGDYKVYDVRKMIAKSEQEIGKATAKYFFYSNIMNFFKTEITLANGEIRKRPLIETNGETGEIVWDKGRDFATVRKVLSMPQVNIVKKTEVQTGGFSKESILPKRNSDKLIARKKDWDPKKYGGFDSPTVAYSVLVVAKVEKGKSKKLKSVKELLGITIMERSSFEKNPIDFLEAKGYKEVKKDLIIKLPKYSLFELENGRKRMLASAGELQKGNELALPSKYVNFLYLASHYEKLKGSPEDNEQKQLFVEQHKHYLDEIIEQISEFSKRVILADANLDKVLSAYNKHRDKPIREQAENIIHLFTLTNLGAPAAFKYFDTTIDRKRYTSTKEVLDATLIHQSITGLYETRIDLSQLGGDSGGSPKKKRKV

SEQ ID NO: 580 - protein, 1767 aa, synthetic construct
MSEVEFSHEYWMRHALTLAKRAWDEREVPVGAVLVHNNRVIGEGWNRPIGRHDPTAHAEIMALRQGGLVMQNYRLIDATLYVTLEPCVMCAGAMIHSRIGRVVFGARDAKTGAAGSLMDVLHHPGMNHRVEITEGILADECAALLSDFFRMRRQEIKAQKKAQSSTDSGGSSGGSSGSETPGTSESATPESSGGSSGGSSEVEFSHEYWMRHALTLAKRAWDEREVPVGAVLVLNNRVIGEGWNRAIGLHDPTAHAEIMALRQGGLVMQNYRLIDATLYVTFEPCVMCAGAMIHSRIGRVVFGVRNAKTGAAGSLMDVLHYPGMNHRVEITEGILADECNALLCYFFRMPRQVFNAQKKAQSSTDSGGSSGGSSGSETPGTSESATPESDKKYSIGLAIGTNSVGWAVITDEYKVPSKKFKVLGNTDRHSIKKNLIGALLFDSGETAEATRLKRTARRRYTRRKNRICYLQEIFSNEMAKVDDSFFHRLEESFLVEEDKKHERHPIFGNIVDEVAYHEKYPTIYHLRKKLVDSTDKADLRLIYLALAHMIKFRGHFLIEGDLNPDNSDVDKLFIQLVQTYNQLFEENPINASGVDAKAILSARLSKSRRLENLIAQLPGEKKNGLFGNLIALSLGLTPNFKSNFDLAEDAKLQLSKDTYDDDLDNLLAQIGDQYADLFLAAKNLSDAILLSDILRVNTEITKAPLSASMIKRYDEHHQDLTLLKALVRQQLPEKYKEIFFDQSKNGYAGYIDGGASQEEFYKFIKPILEKMDGTEELLVKLNREDLLRKQRTFDNGSIPHQIHLGELHAILRRQEDFYPFLKDNREKIEKILTFRIPYYVGPLARGNSRFAWMTRKSEETITPWNFEEVVDKGASAQSFIERMTNFDKNLPNEKVLPKHSLLYEYFTVYNELTKVKYVTEGMRKPAFLSGEQKKAIVDLLFKTNRKVTVKQLKEDYFKKIECFDSVEISGVEDRFNASLGTYHDLLKIIKDKDFLDNEENEDILEDIVLTLTLFEDREMIEERLKTYAHLFDDKVMKQLKRRRYTGWGRLSRKLINGIRDKQSGKTILDFLKSDGFANRNFMQLIHDDSLTFKEDIQKAQVSGQGDSLHEHIANLAGSPAIKKGILQTVKVVDELVKVMGRHKPENIVIEMARENQTTQKGQKNSRERMKRIEEGIKELGSQILKEHPVENTQLQNEKLYLYYLQNGRDMYVDQELDINRLSDYDVDHIVPQSFLKDDSIDNKVLTRSDKNRGKSDNVPSEEVVKKMKNYWRQLLNAKLITQRKFDNLTKAERGGLSELDKAGFIKRQLVETRQITKHVAQILDSRMNTKYDENDKLIREVKVITLKSKLVSDFRKDFQFYKVREINNYHHAHDAYLNAVVGTALIKKYPKLESEFVYGDYKVYDVRKMIAKSEQEIGKATAKYFFYSNIMNFFKTEITLANGEIRKRPLIETNGETGEIVWDKGRDFATVRKVLSMPQVNIVKKTEVQTGGFSKESILPKRNSDKLIARKKDWDPKKYGGFDSPTVAYSVLVVAKVEKGKSKKLKSVKELLGITIMERSSFEKNPIDFLEAKGYKEVKKDLIIKLPKYSLFELENGRKRMLASAGELQKGNELALPSKYVNFLYLASHYEKLKGSPEDNEQKQLFVEQHKHYLDEIIEQISEFSKRVILADANLDKVLSAYNKHRDKPIREQAENIIHLFTLTNLGAPAAFKYFDTTIDRKRYTSTKEVLDATLIHQSITGLYETRIDLSQLGGDSGGSPKKKRKV

SEQ ID NO: 581 - protein, 1767 aa, synthetic construct
MSEVEFSHEYWMRHALTLAKRAWDEREVPVGAVLVHNNRVIGEGWNRPIGRHDPTAHAEIMALRQGGLVMQNYRLIDATLYVTLEPCVMCAGAMIHSRIGRVVFGARDAKTGAAGSLMDVLHHPGMNHRVEITEGILADECAALLSDFFRMRRQEIKAQKKAQSSTDSGGSSGGSSGSETPGTSESATPESSGGSSGGSSEVEFSHEYWMRHALTLAKRALDEREVPVGAVLVLNNRVIGEGWNRAIGLHDPTAHAEIMALRQGGLVMQNYRLIDATLYVTFEPCVMCAGAMIHSRIGRVVFGVRNAKTGAAGSLMDVLHYPGMNHRVEITEGILADECAALLCYFFRMPRQVFNAQKKAQSSTDSGGSSGGSSGSETPGTSESATPESDKKYSIGLAIGTNSVGWAVITDEYKVPSKKFKVLGNTDRHSIKKNLIGALLFDSGETAEATRLKRTARRRYTRRKNRICYLQEIFSNEMAKVDDSFFHRLEESFLVEEDKKHERHPIFGNIVDEVAYHEKYPTIYHLRKKLVDSTDKADLRLIYLALAHMIKFRGHFLIEGDLNPDNSDVDKLFIQLVQTYNQLFEENPINASGVDAKAILSARLSKSRRLENLIAQLPGEKKNGLFGNLIALSLGLTPNFKSNFDLAEDAKLQLSKDTYDDDLDNLLAQIGDQYADLFLAAKNLSDAILLSDILRVNTEITKAPLSASMIKRYDEHHQDLTLLKALVRQQLPEKYKEIFFDQSKNGYAGYIDGGASQEEFYKFIKPILEKMDGTEELLVKLNREDLLRKQRTFDNGSIPHQIHLGELHAILRRQEDFYPFLKDNREKIEKILTFRIPYYVGPLARGNSRFAWMTRKSEETITPWNFEEVVDKGASAQSFIERMTNFDKNLPNEKVLPKHSLLYEYFTVYNELTKVKYVTEGMRKPAFLSGEQKKAIVDLLFKTNRKVTVKQLKEDYFKKIECFDSVEISGVEDRFNASLGTYHDLLKIIKDKDFLDNEENEDILEDIVLTLTLFEDREMIEERLKTYAHLFDDKVMKQLKRRRYTGWGRLSRKLINGIRDKQSGKTILDFLKSDGFANRNFMQLIHDDSLTFKEDIQKAQVSGQGDSLHEHIANLAGSPAIKKGILQTVKVVDELVKVMGRHKPENIVIEMARENQTTQKGQKNSRERMKRIEEGIKELGSQILKEHPVENTQLQNEKLYLYYLQNGRDMYVDQELDINRLSDYDVDHIVPQSFLKDDSIDNKVLTRSDKNRGKSDNVPSEEVVKKMKNYWRQLLNAKLITQRKFDNLTKAERGGLSELDKAGFIKRQLVETRQITKHVAQILDSRMNTKYDENDKLIREVKVITLKSKLVSDFRKDFQFYKVREINNYHHAHDAYLNAVVGTALIKKYPKLESEFVYGDYKVYDVRKMIAKSEQEIGKATAKYFFYSNIMNFFKTEITLANGEIRKRPLIETNGETGEIVWDKGRDFATVRKVLSMPQVNIVKKTEVQTGGFSKESILPKRNSDKLIARKKDWDPKKYGGFDSPTVAYSVLVVAKVEKGKSKKLKSVKELLGITIMERSSFEKNPIDFLEAKGYKEVKKDLIIKLPKYSLFELENGRKRMLASAGELQKGNELALPSKYVNFLYLASHYEKLKGSPEDNEQKQLFVEQHKHYLDEIIEQISEFSKRVILADANLDKVLSAYNKHRDKPIREQAENIIHLFTLTNLGAPAAFKYFDTTIDRKRYTSTKEVLDATLIHQSITGLYETRIDLSQLGGDSGGSPKKKRKV

SEQ ID NO: 582 - protein, 1775 aa, synthetic construct; identical to SEQ ID NO: 571

SEQ ID NO: 583 - protein, 1775 aa, synthetic construct; identical to SEQ ID NO: 572

SEQ ID NO: 584 - protein, 1775 aa, synthetic construct; identical to SEQ ID NO: 576

SEQ ID NO: 585 - protein, 1773 aa, synthetic construct
MSEVEFSHEYWMRHALTLAKRAWDEREVPVGAVLVHNNRVIGEGWNRPIGRHDPTAHAEIMALRQGGLVMQNYRLIDATLYVTLEPCVMCAGAMIHSRIGRVVFGARDAKTGAAGSLMDVLHHPGMNHRVEITEGILADECAALLSDFFRMRRQEIKAQKKAQSSTDSGGSSGGSSGSETPGTSESATPESSGGSSGGSSEVEFSHEYWMRHALTLAKRALDEREVPVGAVLVLNNRGEGWNRAIGLHDPTAHAEIMALRQGGLVMQNYRLIDATLYVTFEPCVMCAGAMIHSRIGRVVFGVRNAKTGAAGSLMDVLHYPGMNHRVEITEGILADECNALLCYFFRMPRQVFNAQKKAQSSTDSGGSSGGSSGSETPGTSESATPESSGGSSGGSDKKYSIGLAIGTNSVGWAVITDEYKVPSKKFKVLGNTDRHSIKKNLIGALLFDSGETAEATRLKRTARRRYTRRKNRICYLQEIFSNEMAKVDDSFFHRLEESFLVEEDKKHERHPIFGNIVDEVAYHEKYPTIYHLRKKLVDSTDKADLRLIYLALAHMIKFRGHFLIEGDLNPDNSDVDKLFIQLVQTYNQLFEENPINASGVDAKAILSARLSKSRRLENLIAQLPGEKKNGLFGNLIALSLGLTPNFKSNFDLAEDAKLQLSKDTYDDDLDNLLAQIGDQYADLFLAAKNLSDAILLSDILRVNTEITKAPLSASMIKRYDEHHQDLTLLKALVRQQLPEKYKEIFFDQSKNGYAGYIDGGASQEEFYKFIKPILEKMDGTEELLVKLNREDLLRKQRTFDNGSIPHQIHLGELHAILRRQEDFYPFLKDNREKIEKILTFRIPYYVGPLARGNSRFAWMTRKSEETITPWNFEEVVDKGASAQSFIERMTNFDKNLPNEKVLPKHSLLYEYFTVYNELTKVKYVTEGMRKPAFLSGEQKKAIVDLLFKTNRKVTVKQLKEDYFKKIECFDSVEISGVEDRFNASLGTYHDLLKIIKDKDFLDNEENEDILEDIVLTLTLFEDREMIEERLKTYAHLFDDKVMKQLKRRRYTGWGRLSRKLINGIRDKQSGKTILDFLKSDGFANRNFMQLIHDDSLTFKEDIQKAQVSGQGDSLHEHIANLAGSPAIKKGILQTVKVVDELVKVMGRHKPENIVIEMARENQTTQKGQKNSRERMKRIEEGIKELGSQILKEHPVENTQLQNEKLYLYYLQNGRDMYVDQELDINRLSDYDVDHIVPQSFLKDDSIDNKVLTRSDKNRGKSDNVPSEEVVKKMKNYWRQLLNAKLITQRKFDNLTKAERGGLSELDKAGFIKRQLVETRQITKHVAQILDSRMNTKYDENDKLIREVKVITLKSKLVSDFRKDFQFYKVREINNYHHAHDAYLNAVVGTALIKKYPKLESEFVYGDYKVYDVRKMIAKSEQEIGKATAKYFFYSNIMNFFKTEITLANGEIRKRPLIETNGETGEIVWDKGRDFATVRKVLSMPQVNIVKKTEVQTGGFSKESILPKRNSDKLIARKKDWDPKKYGGFDSPTVAYSVLVVAKVEKGKSKKLKSVKELLGITIMERSSFEKNPIDFLEAKGYKEVKKDLIIKLPKYSLFELENGRKRMLASAGELQKGNELALPSKYVNFLYLASHYEKLKGSPEDNEQKQLFVEQHKHYLDEIIEQISEFSKRVILADANLDKVLSAYNKHRDKPIREQAENIIHLFTLTNLGAPAAFKYFDTTIDRKRYTSTKEVLDATLIHQSITGLYETRIDLSQLGGDSGGSPKKKRKV

SEQ ID NO: 586 - protein, 1775 aa, synthetic construct; identical to SEQ ID NO: 575

SEQ ID NO: 587-619 - skipped (33 entries)

SEQ ID NO: 620 - DNA, 23 bp, synthetic construct
  source 1..23: mol_type = other DNA
ccaccggcaagctgcccgtgccc

SEQ ID NO: 621 - DNA, 24 bp, synthetic construct
  source 1..24: mol_type = other DNA
cctgaggccaagctgcccgtgccc

SEQ ID NO: 622 - DNA, 23 bp, synthetic construct
  source 1..23: mol_type = other DNA
ccaccggcaagctgcccatgccc

SEQ ID NO: 623 - DNA, 19 bp, synthetic construct
  source 1..19: mol_type = other DNA
accagggctcccacccggt

SEQ ID NO: 624 - DNA, 33 bp, synthetic construct
  source 1..33: mol_type = other DNA
catccagtcccaccagggctcccacccggtccc

SEQ ID NO: 625 - DNA, 20 bp, synthetic construct
  source 1..20: mol_type = other DNA
catccagtcccaccaaaact

SEQ ID NO: 626 - DNA, 23 bp, synthetic construct
  source 1..23: mol_type = other DNA
catccagtcccaccaaaactccc

SEQ ID NO: 627-659 - skipped (33 entries)

SEQ ID NO: 660 - protein, 239 aa, unidentified
  source 1..239: note = EGFP sequence
MVSKGEELFTGVVPILVELDGDVNGHKFSVSGEGEGDATYGKLTLKFICTTGKLPVPWPTLVTTLTYGVQCFSRYPDHMKQHDFFKSAMPEGYVQERTIFFKDDGNYKTRAEVKFEGDTLVNRIELKGIDFKEDGNILGHKLEYNYNSHNVYIMADKQKNGIKVNFKIRHNIEDGSVQLADHYQQNTPIGDGPVLLPDNHYLSTQSALSKDPNEKRDHMVLLEFVTAAGITLGMDELYK

SEQ ID NO: 661 - protein, 50 aa, synthetic construct
MVSKGEELFTGVVPILVELDGDVNGHKFSVSGEGEGDATYGKLTLKFICT

SEQ ID NO: 662 - protein, 246 aa, synthetic construct
MVSKGEELFTGVVPILVELDGDVNGHKFSVSGEGEGDALKTTLTYTYGKLTLKFICTTGKLPVPWPTLGTTLTYGVQCFSRYPDHMKQHDFFKSAMPEGYVQERTIFFKDDGNYKTRAEVKFEGDTLVNRIELKGIDFKEDGNILGHKLEYNYNSHNVYIMADKQKNGIKVNFKIRHNIEDGSVQLADHYQQNTPIGDGPVLLPDNHYLSTQSALSKDPNEKRDHMVLLEFVTAAGITLGMDELYK

SEQ ID NO: 663-666 - skipped (4 entries)

SEQ ID NO: 667 - DNA, 1488 bp, synthetic construct
  source 1..1488: mol_type = other DNA
atggagaaaaaaatcactggatataccaccgttgatatatcccaatggcatcgtaaagaacattttgaggcatttcagtcagttgctcaatgtacctataaccagaccgttcagctggatattacggcctttttaaagaccgtaaagaaaaataagcacaagttttatccggcctttattcacattcttgcccgcctgatgaatgctcatccggagttccgtatggcaatgaaagacggtgagctggtgatatgggatagtgttcacccttgttacaccgttttccatgagcaaactgaaacgttttcatcgctctggagtgaataccacgacgatttccggcagtttctacacatatattcgcaagatgtggcgtgttacggtgaaaacctggcctatttccctaaagggtttattgagaatatgtttttcgtctcagccaatccctgggtgagtttcaccagttttgatttaaacgtggccaatatggacaacttcttcgcccccgttttcactatgggcaaatattatacgcaaggcgacaaggtgctgatgccgctggcgattcaggttcatgctgccgtttgtgatggcttccatgtcggcagaatgcttaatgaattacaacagtactgcgatgagtggcagggcggggcgggcagcggttctggctccagccatattcaacgggaaacgtcttgctcgaggccgcgattaaattccaacatggatgctgatttatatgggtataaatgggctcgcgataatgtcgggcaatcaggtgcgacaatctatcgattgtatgggaagcccgatgcgccagagttgtttctgaaacatggcaaaggtagcgttgccaatgatgttacagatgagatggtcagactaaactggctgacggaatttatgcctcttccgaccatcaagcattttatccgtactcctgatgatgcatggttactcaccactgcgatccccgggaaaacagcattccaggtattagaagaatatcctgattcaggtgaaaatattgttgatgcgctggcagtgttcctgcgccggttgcattcgattcctgtttgtaattgtccttttaacagcgatcgcgtatttcgtctcgctcaggcgcaatcacgaatgaataacggtttggttgatgcgagtgattttgatgacgagcgtaatggctggcctgttgaacaagtctggaaagaaatgcataagcttttgccattctcaccggattcagtcgtcactcatggtgatttctcacttgataaccttatttttgacgaggggaaattaataggttgtattgatgttggacgagtcggaatcgcagaccgataccaggatcttgccatcctatggaactgcctcggtgagttttctccttcattacagaaacggctttttcaaaaatatggtattgataatcctgatatgaataaattgcagtttcatttgatgctcgatgagtttttctaa

SEQ ID NO: 668 - protein, 495 aa, synthetic construct
MEKKITGYTTVDISQWHRKEHFEAFQSVAQCTYNQTVQLDITAFLKTVKKNKHKFYPAFIHILARLMNAHPEFRMAMKDGELVIWDSVHPCYTVFHEQTETFSSLWSEYHDDFRQFLHIYSQDVACYGENLAYFPKGFIENMFFVSANPWVSFTSFDLNVANMDNFFAPVFTMGKYYTQGDKVLMPLAIQVHAAVCDGFHVGRMLNELQQYCDEWQGGAGSGSGSSHIQRETSCSRPRLNSNMDADLYGYKWARDNVGQSGATIYRLYGKPDAPELFLKHGKGSVANDVTDEMVRLNWLTEFMPLPTIKHFIRTPDDAWLLTTAIPGKTAFQVLEEYPDSGENIVDALAVFLRRLHSIPVCNCPFNSDRVFRLAQAQSRMNNGLVDASDFDDERNGWPVEQVWKEMHKLLPFSPDSVVTHGDFSLDNLIFDEGKLIGCIDVGRVGIADRYQDLAILWNCLGEFSPSLQKRLFQKYGIDNPDMNKLQFHLMLDEFF

SEQ ID NO: 669 - DNA, 1488 bp, synthetic construct
  source 1..1488: mol_type = other DNA
atggagaaaaaaatcactggatataccaccgttgatatatcccaatggcatcgtaaagaacattttgaggcatttcagtcagttgctcaatgtacctataaccagaccgttcagctggatattacggcctttttaaagaccgtaaagaaaaataagcacaagttttatccggcctttattcacattcttgcccgcctgatgaatgctcatccggagttccgtatggcaatgaaagacggtgagctggtgatatgggatagtgttcacccttgttacaccgttttccatgagcaaactgaaacgttttcatcgctctggagtgaataccacgacgatttccggcagtttctacacatatattcgcaagatgtggcgtgttacggtgaaaacctggcctatttccctaaagggtttattgagaatatgtttttcgtctcagccaatccctgggtgagtttcaccagttttgatttaaacgtggccaatatggacaacttcttcgcccccgttttcactatgggcaaatattatacgcaaggcgacaaggtgctgatgccgctggcgattcaggttcatcatgccgtttgtgatggcttccatgtcggcagaatgcttaatgaattacaacagtactgcgatgagtggcagggcggggcgggcagcggttctggctccagccatattcaacgggaaacgtcttgctcgaggccgcgattaaattccaacatggatgctgatttatatgggtataaatgggctcgcgataatgtcgggcaatcaggtgcgacaatctatcgattgtatgggaagcccgatgcgccagagttgtttctgaaacatggcaaaggtagcgttgccaatgatgttacagatgagatggtcagactaaactggctgacggaatttatgcctcttccgaccatcaagcattttatccgtactcctgatgatgcatggttactcaccactgcgatccccgggaaaacagcattccaggtattagaagaatatcctgattcaggtgaaaatattgttgatgcgctggcagtgttcctgcgccggttgcattcgattcctgtttgtaattgtccttttaacagcgatcgcgtatttcgtctcgctcaggcgcaatcacgaatgaataacggtttggttgatgcgagtgattttgatgacgagcgtaatggctggcctgttgaacaagtctggaaagaaatgcataagcttttgccattctcaccggattcagtcgtcactcatggtgatttctcacttgataaccttatttttgacgaggggaaattaataggttgtattgctgttggacgagtcggaatcgcagaccgataccaggatcttgccatcctatggaactgcctcggtgagttttctccttcattacagaaacggctttttcaaaaatatggtattgataatcctgatatgaataaattgcagtttcatttgatgctcgatgagtttttctaa

SEQ ID NO: 670 - protein, 495 aa, synthetic construct
MEKKITGYTTVDISQWHRKEHFEAFQSVAQCTYNQTVQLDITAFLKTVKKNKHKFYPAFIHILARLMNAHPEFRMAMKDGELVIWDSVHPCYTVFHEQTETFSSLWSEYHDDFRQFLHIYSQDVACYGENLAYFPKGFIENMFFVSANPWVSFTSFDLNVANMDNFFAPVFTMGKYYTQGDKVLMPLAIQVHHAVCDGFHVGRMLNELQQYCDEWQGGAGSGSGSSHIQRETSCSRPRLNSNMDADLYGYKWARDNVGQSGATIYRLYGKPDAPELFLKHGKGSVANDVTDEMVRLNWLTEFMPLPTIKHFIRTPDDAWLLTTAIPGKTAFQVLEEYPDSGENIVDALAVFLRRLHSIPVCNCPFNSDRVFRLAQAQSRMNNGLVDASDFDDERNGWPVEQVWKEMHKLLPFSPDSVVTHGDFSLDNLIFDEGKLIGCIAVGRVGIADRYQDLAILWNCLGEFSPSLQKRLFQKYGIDNPDMNKLQFHLMLDEFF

SEQ ID NO: 671-700 - skipped (30 entries)

SEQ ID NO: 701 - RNA, 20 nt, synthetic construct
  source 1..20: mol_type = other RNA
gggcacgggcagcttgccgg

SEQ ID NO: 702 - RNA, 20 nt, synthetic construct
  source 1..20: mol_type = other RNA
gggcacgggcagcttgcctc

SEQ ID NO: 703 - RNA, 20 nt, synthetic construct
  source 1..20: mol_type = other RNA
gtggtcacgagggtgggcca

SEQ ID NO: 704 - RNA, 20 nt, synthetic construct
  source 1..20: mol_type = other RNA
gtaggtcagggtggtcacga

SEQ ID NO: 705 - RNA, 20 nt, synthetic construct
  source 1..20: mol_type = other RNA
gtggtcccgagggtgggcca

SEQ ID NO: 706 - RNA, 20 nt, synthetic construct
  source 1..20: mol_type = other RNA
gtaggtcagggtggtaaaga

SEQ ID NO: 707 - RNA, 20 nt, synthetic construct
  source 1..20: mol_type = other RNA
ggtacctatcgattgtcagg

SEQ ID NO: 708 - RNA, 20 nt, synthetic construct
  source 1..20: mol_type = other RNA
caggacggtcacctttgggg

SEQ ID NO: 709 - RNA, 20 nt, synthetic construct
  source 1..20: mol_type = other RNA
ggtgacaagtgtgatcactt

SEQ ID NO: 710 - DNA, 50 bp, synthetic construct
  source 1..50: mol_type = other DNA
acactctttccctacacgacgctcttccgatctcggccacaagttcagcg

SEQ ID NO: 711 - DNA, 54 bp, synthetic construct
  source 1..54: mol_type = other DNA
  misc_difference 34..37: note = a, c, t, g, unknown or other
acactctttccctacacgacgctcttccgatctnnnncggccacaagttcagcg

SEQ ID NO: 712 - DNA, 55 bp, synthetic construct
  source 1..55: mol_type = other DNA
  misc_difference 34..37: note = a, c, t, g, unknown or other
acactctttccctacacgacgctcttccgatctnnnnacggccacaagttcagcg

SEQ ID NO: 713 - DNA, 53 bp, synthetic construct
  source 1..53: mol_type = other DNA
  misc_difference 34..37: note = a, c, t, g, unknown or other
acactctttccctacacgacgctcttccgatctnnnnacggcgacgtaaacgg

SEQ ID NO: 714 - DNA, 44 bp, synthetic construct
  source 1..44: mol_type = other DNA
tggagttcagacgtgtgctcttccgatctcttcgggcatggcgg

SEQ ID NO: 715 - DNA, 46 bp, synthetic construct
  source 1..46: mol_type = other DNA
tggagttcagacgtgtgctcttccgatctgctgcttcatgtggtcg

SEQ ID NO: 716 - DNA, 16 bp, synthetic construct
  source 1..16: mol_type = other DNA
acggcgacgtaaacgg

SEQ ID NO: 717 - DNA, 17 bp, synthetic construct
  source 1..17: mol_type = other DNA
gctgcttcatgtggtcg

SEQ ID NO: 718 - DNA, 53 bp, synthetic construct
  source 1..53: mol_type = other DNA
  misc_difference 34..37: note = a, c, t, g, unknown or other
acactctttccctacacgacgctcttccgatctnnnnctgtccccttctgggc

SEQ ID NO: 719 - DNA, 55 bp, synthetic construct
  source 1..55: mol_type = other DNA
  misc_difference 34..37: note = a, c, t, g, unknown or other
acactctttccctacacgacgctcttccgatctnnnntactgtccccttctgggc

SEQ ID NO: 720 - DNA, 57 bp, synthetic construct
  source 1..57: mol_type = other DNA
  misc_difference 34..37: note = a, c, t, g, unknown or other
acactctttccctacacgacgctcttccgatctnnnngtcgtccatgctgtgtttgc

SEQ ID NO: 721 - DNA, 48 bp, synthetic construct
  source 1..48: mol_type = other DNA
tggagttcagacgtgtgctcttccgatctggaaaatgagagctgcagg

SEQ ID NO: 722-799 - skipped (78 entries)

SEQ ID NO: 800 - protein, 36 aa, unidentified
  source 1..36: note = Zn2+-coordinating motif
  VARIANT 2: note = Any amino acid
  VARIANT 4..29: note = Any amino acid
  VARIANT 27..29: note = May be deleted
  VARIANT 32..35: note = Any amino acid
  VARIANT 34..35: note = May be deleted
HXEXXXXXXXXXXXXXXXXXXXXXXXXXXPCXXXXC

SEQ ID NO: 801 - protein, 96 aa, synthetic construct
  VARIANT 1..40: note = SGGS repeats may  be deleted
  VARIANT 57..96: note = SGGS repeats may  be deleted
SGGSSGGSSGGSSGGSSGGSSGGSSGGSSGGSSGGSSGGSSGSETPGTSESATPESSGGSSGGSSGGSSGGSSGGSSGGSSGGSSGGSSGGSSGGS

SEQ ID NO: 802 - protein, 32 aa, synthetic construct; identical to SEQ ID NO: 308

SEQ ID NO: 803 - protein, 6 aa, synthetic construct
HHHHHH

SEQ ID NO: 804 - protein, 8 aa, synthetic construct
SGGSSGGS

SEQ ID NO: 805 - protein, 60 aa, synthetic construct
  VARIANT 3..60: note = XP repeats may be deleted wherein X is any amino acid
XPXPXPXPXPXPXPXPXPXPXPXPXPXPXPXPXPXPXPXPXPXPXPXPXPXPXPXPXPXP

SEQ ID NO: 806 - protein, 45 aa, synthetic construct
  VARIANT 4..45: note = GGS repeats may be deleted
GGSGGSGGSGGSGGSGGSGGSGGSGGSGGSGGSGGSGGSGGSGGS

SEQ ID NO: 807 - protein, 21 aa, synthetic construct
  VARIANT 4..21: note = 4 or 6 GGS repeats may be deleted
GGSGGSGGSGGSGGSGGSGGS

SEQ ID NO: 808 - DNA, 32 bp, synthetic construct
  source 1..32: mol_type = other DNA
tagagggtatataatggaagctcgacttccag

SEQ ID NO: 809 - DNA, 30 bp, synthetic construct
  source 1..30: mol_type = other DNA
tttacactttatgcttccggctcgtatgtt

SEQ ID NO: 810 - DNA, 17 bp, synthetic construct
  source 1..17: mol_type = other DNA
ttgtgagcggataacaa

SEQ ID NO: 811 - DNA, 31 bp, synthetic construct
  source 1..31: mol_type = other DNA
tttacactttatgcttccggctcgtataatg

SEQ ID NO: 812 - DNA, 29 bp, synthetic construct
  source 1..29: mol_type = other DNA
ttgacaattaatcatcgaactagttaact

SEQ ID NO: 813 - DNA, 29 bp, synthetic construct
  source 1..29: mol_type = other DNA
ttgacaattaatcatcggctcgtataatg

SEQ ID NO: 814 - DNA, 30 bp, synthetic construct
  source 1..30: mol_type = other DNA
ttgacaattaatcatccggctcgtataatg

SEQ ID NO: 815 - DNA, 19 bp, synthetic construct
  source 1..19: mol_type = other DNA
tccctatcagtgatagaga

SEQ ID NO: 816 - DNA, 30 bp, synthetic construct
  source 1..30: mol_type = other DNA
ttgacactctatcattgatagagttatttt

SEQ ID NO: 817 - DNA, 19 bp, synthetic construct
  source 1..19: mol_type = other DNA
taatacgactcactatagg

SEQ ID NO: 818 - DNA, 19 bp, synthetic construct
  source 1..19: mol_type = other DNA
aattaaccctcactaaagg

SEQ ID NO: 819 - DNA, 45 bp, synthetic construct
  source 1..45: mol_type = other DNA
tcataaaaaatttatttgctttgtgagcggataacaattataata

SEQ ID NO: 820 - DNA, 166 bp, synthetic construct
  source 1..166: mol_type = other DNA
aaagccatgacaaaaacgcgtaacaaaagtgtctataatcacggcagaaaagtccacattgattatttgcacggcgtcacactttgctatgccatagcatttttatccataagattagcggatcctacctgacgctttttatcgcaactctctactgtttctccat

SEQ ID NO: 821 - DNA, 29 bp, synthetic construct
  source 1..29: mol_type = other DNA
attgcgagctctattccgtgataatttgg

SEQ ID NO: 822 - DNA, 119 bp, synthetic construct
  source 1..119: mol_type = other DNA
caccacaattcagcaaattgtgaacatcatcacgttcatctttccctggttgccaatggcccattttcctgtcagtaacgagaaggtcgcgaattcaggcgctttttagactggtcgta

SEQ ID NO: 823 - DNA, 59 bp, synthetic construct
  source 1..59: mol_type = other DNA
tatctctggcggtgttgacataaataccactggcggtgatactgagcacatcagcagga

SEQ ID NO: 824 - DNA, 59 bp, synthetic construct
  source 1..59: mol_type = other DNA
taacaccgtgcgtgttgactgttttacctctggcggtgataatggttgcatgtactaag

SEQ ID NO: 825 - DNA, 274 bp, synthetic construct
  source 1..274: mol_type = other DNA
gcagattgagtaaccgtgaatgtttgtacaaatgtttcaaagatgttactatgagtgtcccggccagcatcactttatattttgtgacgtctggccggacgttttccctagtgttggctgttttagcgacctggccgtacaggtcaggtttttttttaccgctaaacaactgaagccattgtaacctctgaatgattcattgtaagttactcttaagtatcatcttgcctgtactatagtgcaggttaagtccacgttaagtaaaagaagcagc

SEQ ID NO: 826 - DNA, 45 bp, synthetic construct
  source 1..45: mol_type = other DNA
gctttgtttttattttttaatgtatttgtacatggagaaaataaa

SEQ ID NO: 827 - DNA, 70 bp, synthetic construct
  source 1..70: mol_type = other DNA
acttgatactgtatgagcatacagtataattgcttcaacagaacatattgactatccggtattacccggc

SEQ ID NO: 828 - DNA, 19 bp, synthetic construct
  source 1..19: mol_type = other DNA
atttaggtgacactataga

SEQ ID NO: 829 - DNA, 204 bp, synthetic construct
  source 1..204: mol_type = other DNA
gtgatgcggttttggcagtacatcaatgggcgtggatagcggtttgactcacggggatttccaagtctccaccccattgacgtcaatgggagtttgttttggcaccaaaatcaacgggactttccaaaatgtcgtaacaactccgccccattgacgcaaatgggcggtaggcgtgtacggtgggaggtctatataagcagagct

SEQ ID NO: 830 - DNA, 317 bp, synthetic construct
  source 1..317: mol_type = other DNA
ggtgtggaaagtccccaggctccccagcaggcagaagtatgcaaagcatgcatctcaattagtcagcaaccaggtgtggaaagtccccaggctccccagcaggcagaagtatgcaaagcatgcatctcaattagtcagcaaccatagtcccgcccctaactccgcccatcccgcccctaactccgcccagttccgcccattctccgccccatggctgactaattttttttatttatgcagaggccgaggccgcctcggcctctgagctattccagaagtagtgaggaggcttttttggaggcctaggcttttgcaaa

SEQ ID NO: 831 - DNA, 1179 bp, synthetic construct
  source 1..1179: mol_type = other DNA
ggctccggtgcccgtcagtgggcagagcgcacatcgcccacagtccccgagaagttggggggaggggtcggcaattgaaccggtgcctagagaaggtggcgcggggtaaactgggaaagtgatgtcgtgtactggctccgcctttttcccgagggtgggggagaaccgtatataagtgcagtagtcgccgtgaacgttctttttcgcaacgggtttgccgccagaacacaggtaagtgccgtgtgtggttcccgcgggcctggcctctttacgggttatggcccttgcgtgccttgaattacttccacctggctgcagtacgtgattcttgatcccgagcttcgggttggaagtgggtgggagagttcgaggccttgcgcttaaggagccccttcgcctcgtgcttgagttgaggcctggcctgggcgctggggccgccgcgtgcgaatctggtggcaccttcgcgcctgtctcgctgctttcgataagtctctagccatttaaaatttttgatgacctgctgcgacgctttttttctggcaagatagtcttgtaaatgcgggccaagatctgcacactggtatttcggtttttggggccgcgggcggcgacggggcccgtgcgtcccagcgcacatgttcggcgaggcggggcctgcgagcgcggccaccgagaatcggacgggggtagtctcaagctggccggcctgctctggtgcctggcctcgcgccgccgtgtatcgccccgccctgggcggcaaggctggcccggtcggcaccagttgcgtgagcggaaagatggccgcttcccggccctgctgcagggagctcaaaatggaggacgcggcgctcgggagagcgggcgggtgagtcacccacacaaaggaaaagggcctttccgtcctcagccgtcgcttcatgtgactccacggagtaccgggcgccgtccaggcacctcgattagttctcgagcttttggagtacgtcgtctttaggttggggggaggggttttatgcgatggagtttccccacactgagtgggtggagactgaagttaggccagcttggcacttgatgtaattctccttggaatttgccctttttgagtttggatcttggttcattctcaagcctcagacagtggttcaaagtttttttcttccatttcaggtgtcgtga

SEQ ID NO: 832 - RNA, 103 nt, synthetic construct
  source 1..103: mol_type = other RNA
gggcacgggcagcttgccgggttttagagctagaaatagcaagttaaaataaggctagtccgttatcaacttgaaaaagtggcaccgagtcggtgcttttttt

SEQ ID NO: 833 - RNA, 103 nt, synthetic construct
  source 1..103: mol_type = other RNA
gggcacgggcagcttgcctcgttttagagctagaaatagcaagttaaaataaggctagtccgttatcaacttgaaaaagtggcaccgagtcggtgcttttttt

SEQ ID NO: 834 - RNA, 103 nt, synthetic construct
  source 1..103: mol_type = other RNA
gtggtcacgagggtgggccagttttagagctagaaatagcaagttaaaataaggctagtccgttatcaacttgaaaaagtggcaccgagtcggtgcttttttt

SEQ ID NO: 835 - RNA, 103 nt, synthetic construct
  source 1..103: mol_type = other RNA
gtaggtcagggtggtcacgagttttagagctagaaatagcaagttaaaataaggctagtccgttatcaacttgaaaaagtggcaccgagtcggtgcttttttt

SEQ ID NO: 836 - RNA, 103 nt, synthetic construct
  source 1..103: mol_type = other RNA
gtggtcccgagggtgggccagttttagagctagaaatagcaagttaaaataaggctagtccgttatcaacttgaaaaagtggcaccgagtcggtgcttttttt

SEQ ID NO: 837 - RNA, 103 nt, synthetic construct
  source 1..103: mol_type = other RNA
gtaggtcagggtggtaaagagttttagagctagaaatagcaagttaaaataaggctagtccgttatcaacttgaaaaagtggcaccgagtcggtgcttttttt

SEQ ID NO: 838 - RNA, 103 nt, synthetic construct
  source 1..103: mol_type = other RNA
ggtacctatcgattgtcagggttttagagctagaaatagcaagttaaaataaggctagtccgttatcaacttgaaaaagtggcaccgagtcggtgcttttttt

SEQ ID NO: 839 - RNA, 103 nt, synthetic construct
  source 1..103: mol_type = other RNA
caggacggtcacctttgggggttttagagctagaaatagcaagttaaaataaggctagtccgttatcaacttgaaaaagtggcaccgagtcggtgcttttttt

SEQ ID NO: 840 - RNA, 103 nt, synthetic construct
  source 1..103: mol_type = other RNA
ggtgacaagtgtgatcacttgttttagagctagaaatagcaagttaaaataaggctagtccgttatcaacttgaaaaagtggcaccgagtcggtgcttttttt

SEQ ID NO: 841 - RNA, 103 nt, synthetic construct
  source 1..103: mol_type = other RNA
cacacttgtcaccaccccaagttttagagctagaaatagcaagttaaaataaggctagtccgttatcaacttgaaaaagtggcaccgagtcggtgcttttttt

SEQ ID NO: 842 - DNA, 106 bp, synthetic construct
  source 1..106: mol_type = other DNA
gggactttccgggactttccggggactttccgggactttccggggactttccgggactttccaagcttagacactagagggtatataatggaagctcgacttccag

SEQ ID NO: 843 - DNA, 135 bp, synthetic construct
  source 1..135: mol_type = other DNA
gcaccagacagtgacgtcagctgccagatcccatggccgtcatactgtgacgtctttcagacaccccattgacgtcaatgggagaacagataagcttagacactagagggtatataatggaagctcgacttccag

SEQ ID NO: 844 - DNA, 169 bp, synthetic construct
  source 1..169: mol_type = other DNA
agccagacaaagccagacaaaagccagacaaagccagacaaaagccagacaaagccagacaaaagccagacaaagccagacaaaagccagacaaagccagacaaaagccagacaaagccagacaaaagcttagacactagagggtatataatggaagctcgacttccag

SEQ ID NO: 845 - DNA, 86 bp, synthetic construct
  source 1..86: mol_type = other DNA
attgcgcaatattgcgcaatcattgcgcaatattgcgcaatcaagcttagacactagagggtatataatggaagctcgacttccag

SEQ ID NO: 846 - DNA, 170 bp, synthetic construct
  source 1..170: mol_type = other DNA
caggatgtccatattaggacacaggatgtccatattaggacacaggatgtccatattaggacacaggatgtccatattaggacacaggatgtccatattaggacacaggatgtccatattaggacaaagcttagacactagagggtatataatggaagctcgacttccag

SEQ ID NO: 847 - DNA, 135 bp, synthetic construct
  source 1..135: mol_type = other DNA
cggaggaaaaactgtttcatacagaaggcgtggaggaaaaactgtttcatacagaaggcgtggaggaaaaactgtttcatacagaaggcgtagatctagactctagagggtatataatggaagctcgaattccag

SEQ ID NO: 848 - DNA, 74 bp, synthetic construct
  source 1..74: mol_type = other DNA
agaacaaaatgtaccggtacattttgttctaagcttagacactagagggtatataatggaagctcgacttccag

SEQ ID NO: 849 - DNA, 170 bp, synthetic construct
  source 1..170: mol_type = other DNA
tgagttctcacgctagcagattgagttctcacgctagcagattgagttctcacgctagcagattgagttctcacgctagcagattgagttctcacgctagcagattgagttctcacgctagcagataagcttagacactagagggtatataatggaagctcgacttccag

SEQ ID NO: 850 - DNA, 106 bp, synthetic construct
  source 1..106: mol_type = other DNA
ctgactcagcctgagtcagcactgactcagcctgagtcagcactgactcagcctgagtcagcaagcttagacactagagggtatataatggaagctcgacttccag

SEQ ID NO: 851 - DNA, 176 bp, synthetic construct
  source 1..176: mol_type = other DNA
ggaagcgaaaatgaaattgactggaagcgaaaatgaaattgactggaagcgaaaatgaaattgactggaagcgaaaatgaaattgactggaagcgaaaatgaaattgactggaagcgaaaatgaaattgactaagcttagacactagagggtatataatggaagctcgacttccag

SEQ ID NO: 852 - DNA, 134 bp, synthetic construct
  source 1..134: mol_type = other DNA
tagtttcactttccctagtttcactttccctagtttcactttccctagtttcactttccctagtttcactttccctagtttcactttcccaagcttagacactagagggtatataatggaagctcgacttccag

SEQ ID NO: 853 - DNA, 116 bp, synthetic construct
  source 1..116: mol_type = other DNA
tttcgcgggaaatttcgcgggaaatttcgcgggaaatttcgcgggaaatttcgcgggaaatttcgcgggaaaaagcttagacactagagggtatataatggaagctcgacttccag

SEQ ID NO: 854 - DNA, 161 bp, synthetic construct
  source 1..161: mol_type = other DNA
gaacgttcccgaagaacgttcccgaagaacgttcccgaagaacgttcccgaagaacgttcccgaagaacgttcccgaagaacgttcccgaagaacgttcccgaagaacgttcccgaaaagcttagacactagagggtatataatggaagctcgacttccag

SEQ ID NO: 855 - DNA, 170 bp, synthetic construct
  source 1..170: mol_type = other DNA
ggcattctctatctgattgttggcattctctatctgattgttggcattctctatctgattgttggcattctctatctgattgttggcattctctatctgattgttggcattctctatctgattgttaagcttagacactagagggtatataatggaagctcgacttccag

SEQ ID NO: 856 - DNA, 179 bp, synthetic construct
  source 1..179: mol_type = other DNA
ctcgagacaggtgctgacgtggcattcctcgagacaggtgctgacgtggcattcctcgagacaggtgctgacgtggcattcctcgagacaggtgctgacgtggcattcctcgagacaggtgctgacgtggcattcaagcttagacactagagggtatataatggaagctcgacttccag

SEQ ID NO: 857 - DNA, 189 bp, synthetic construct
  source 1..189: mol_type = other DNA
ccttcaccaatcggcggcctccacgacggccttcaccaatcggcggcctccacgacggccttcaccaatcggcggcctccacgacggccttcaccaatcggcggcctccacgacggccttcaccaatcggcggcctccacgacggaagcttagacactagagggtatataatggaagctcgacttccag

SEQ ID NO: 858 - DNA, 146 bp, synthetic construct
  source 1..146: mol_type = other DNA
aggtcaccaggaggtcaaggtcaccaggaggtcaaggtcaccaggaggtcaaggtcaccaggaggtcaaggtcaccaggaggtcaaggtcaccaggaggtcaaagcttagacactagagggtatataatggaagctcgacttccag

SEQ ID NO: 859 - DNA, 128 bp, synthetic construct
  source 1..128: mol_type = other DNA
aggtcacaggtcacaggtcacaggtcacaggtcacaggtcacaggtcacaggtcacaggtcacaggtcacaggtcacaggtcacaagcttagacactagagggtatataatggaagctcgacttccag

SEQ ID NO: 860 - DNA, 164 bp, synthetic construct
  source 1..164: mol_type = other DNA
gatccacaaggttcacgaggttcacgtccggatccacaaggttcacgaggttcacgtccggatccacaaggttcacgaggttcacgtccggatccacaaggttcacgaggttcacgtccgaagcttagacactagagggtatataatggaagctcgacttccag

SEQ ID NO: 861 - DNA, 158 bp, synthetic construct
  source 1..158: mol_type = other DNA
tagcttggaaatgacattgctaatggtgacaaagcaacttttagcttggaaatgacattgctaatggtgacaaagcaactttctcgaggatatcaagatctggcctcggcggccaagcttagacactagagggtatataatggaagctcgacttccag

SEQ ID NO: 862 - DNA, 169 bp, synthetic construct
  source 1..169: mol_type = other DNA
gtcgacatttcccgtaaatcgtcgagtcgacatttcccgtaaatcgtcgagtcgacatttcccgtaaatcgtcgagtcgacatttcccgtaaatcgtcgagtcgacatttcccgtaaatcgtcgaaagcttagacactagagggtatataatggaagctcgacttccag

SEQ ID NO: 863 - DNA, 23 bp, synthetic construct
  source 1..23: mol_type = other DNA
cctgaggcaagctgcccgtgccc

SEQ ID NO: 864 - DNA, 23 bp, synthetic construct
  source 1..23: mol_type = other DNA
ccctcaaaaccaccctgacctac

SEQ ID NO: 865 - DNA, 33 bp, synthetic construct
  source 1..33: mol_type = other DNA
ccctggcccaccctcgggaccaccctgacctac

SEQ ID NO: 866 - protein, 188 aa, synthetic construct
GKLPVPWPTLVTTLTYGVQCFSRYPDHMKQHDFFKSAMPEGYVQERTIFFKDDGNYKTRAEVKFEGDTLVNRIELKGIDFKEDGNILGHKLEYNYNSHNVYIMADKQKNGIKVNFKIRHNIEDGSVQLADHYQQNTPIGDGPVLLPDNHYLSTQSALSKDPNEKRDHMVLLEFVTAAGITLGMDELYK
